(19) United States
(12) Patent Application Publication
(10) Pub. No.: US 2024/0393292 A1
(43) Pub. Date: Nov. 28, 2024

(54) ALLERGY ANTIGEN AND EPITOPE THEREOF

(71) Applicant: HOYU CO., LTD., Aichi (JP)

(72) Inventors: Kayoko Matsunaga, Aichi (JP); Akiko Yagami, Aichi (JP); Yuji Aoki, Aichi (JP); Erika Hasegawa, Aichi (JP); Tomomi Sakai, Aichi (JP)

(21) Appl. No.: 18/587,552

(22) Filed: Feb. 26, 2024

Related U.S. Application Data
(62) Division of application No. 16/899,643, filed on Jun. 12, 2020, now abandoned.

(30) Foreign Application Priority Data
Jun. 13, 2019 (JP) 110700/2019

(51) Int. Cl. G01N 27/447; C07K 1/28; G01N 33/68

(52) U.S. Cl. CPC G01N 27/44778; C07K 1/285; G01N 33/6854; G01N 33/6893; G01N 2800/24

(57) ABSTRACT

The present invention provides novel antigens of an allergy to wheat, methods and kits for diagnosing an allergy to wheat, compositions comprising such an antigen, wheat or processed products of wheat in which such an antigen is eliminated, and a tester composition for determining the presence or absence of a wheat antigen in an object of interest. The present invention also relates to polypeptides comprising an epitope of an antigen, kits, compositions and methods for diagnosing an allergy, comprising such a polypeptide, compositions comprising such a polypeptide, and raw materials or processed products in which an antigen comprising such a polypeptide is eliminated or reduced. The present invention further relates to a tester composition for determining the presence or absence of an antigen in an object of interest.

### REFERENCE TO RELATED APPLICATION

[0001] This application is a divisional application of U.S. patent application Ser. No. 16/899,643, filed on Jun. 12, 2020, which claims foreign priority to Japanese Patent Application No. JP 110700/2019, filed on Jun. 13, 2019, the entire content of which is incorporated herein by reference.

### SEQUENCE LISTING

[0002] The instant application contains a Sequence Listing XML file which has been submitted electronically in XML format. The Sequence Listing XML file, created on Feb. 23, 2024, is named 129249-01003.xml, and is 4,789,002 bytes in size. The Sequence Listing XML file is part of the specification, and is incorporated in its entirety by reference herein.

### TECHNICAL FIELD

[0003] The present invention relates to a novel antigen of an allergy to wheat, etc. The present invention also relates to a kit, a composition, and a method for diagnosing allergy to wheat, etc. The present invention also relates to a composition comprising such an antigen and raw materials or processed products in which such an antigen is eliminated or reduced. The present invention further relates to a tester composition for determining the presence or absence of a wheat antigen in an object of interest.

[0004] The present invention also relates to an antigen of a polypeptide comprising an epitope. The present invention also relates to a kit, a composition and a method for diagnosing an allergy, comprising such a polypeptide. The present invention also relates to a method for providing an indicator for diagnosing an allergy in a subject. The present invention also relates to a composition comprising such a polypeptide, and a raw material or a processed product in which such a polypeptide is eliminated or reduced. The present invention further relates to a method for producing a raw material and a processed product in which such a polypeptide is eliminated or reduced. The present invention further relates to a tester composition for determining the presence or absence of an antigen comprising such a polypeptide in an object of interest.

### BACKGROUND ART

[0005] In serum and tissues of allergic patients, IgE antibodies specific to particular antigens (hereinafter also referred to as allergens) are produced. Physiological consequences caused by interaction between such IgE antibodies and such particular antigens elicit allergic reactions. The antigens refer to food or cooking ingredients, etc. that cause allergic symptoms in a broad sense, and refer to proteins (hereinafter also referred to as allergen components) contained in food or cooking ingredients, etc. to which specific IgE antibodies bind in a narrow sense.

[0006] In the process of production of conventional allergy testing agents, antigen reagents are commonly prepared simply by grinding a candidate allergenic food, cooking ingredient or the like (Patent Literature 1). For this reason, the only case where conventional allergy tests have permitted detection of a positive allergic reaction is when in a conventional antigen reagent containing many types of allergen components, an allergen component is present in an amount exceeding a threshold that allows determination of a positive reaction for binding to an IgE antibody, and diagnosis efficiency was not sufficiently high.

[0007] Some allergen components have been suggested for allergen candidate food or cooking ingredients, and have also been commercialized as testing kits. While it is necessary to exhaustively identify allergen components in order to enhance the reliability of allergy tests, the patient detection rate by the measurement of such allergenic components is far from sufficient. Identification of novel allergens in wheat is very important not only for increasing the precision of diagnosis, but also for determining targets of low allergenic food, low allergenic cooking ingredients and therapeutic agents.

[0008] Meanwhile, in the field of protein separation and purification, a method for separating and purifying many different proteins from a small amount of sample has been used in recent years, which is more specifically a two-dimensional electrophoresis consisting of isoelectric focusing in the first dimension, followed by SDS-PAGE (sodium dodecyl sulfate-polyacrylamide gel electrophoresis) in the second dimension. The present applicant has conventionally developed some 2D electrophoresis methods with high separation ability (Patent Literature 2-5).

[0009] Allergen-specific IgE antibodies recognize and bind to epitopes that are particular amino acid sequences in allergen components. However, only a slight number of analyses have been made on epitopes as to the allergen components (Non Patent Literature 1), but such analyses are still totally quite rare. Furthermore, any kit for diagnosing an allergy using a polypeptide comprising an epitope has not yet emerged in the market.

### CITATION LIST

### Patent Literature

[0010] PTL1: Japanese Patent Application Publication No. JP 2002-286716
[0011] PTL2: Japanese Patent Application Publication No. JP 2011-33544
[0012] PTL3: Japanese Patent Application Publication No. JP 2011-33546
[0013] PTL4: Japanese Patent Application Publication No. JP 2011-33547
[0014] PTL5: Japanese Patent Application Publication No. JP 2011-33548

### Non Patent Literature

[0015] NPL 1: Matsuo, H., et al., J. Biol. Chem., (2004), Vol. 279, No. 13, pp. 12135-12140

### SUMMARY OF INVENTION

### Technical Problem

[0016] The present invention provides novel antigens of an allergy which are proteins. The present invention also provides methods and kits for diagnosing allergy, comprising such an antigen. The present invention also provides compositions comprising such an antigen and raw materials or processed products in which such an antigen is eliminated or reduced. The present invention further provides tester compositions for determining the presence or absence of an antigen in an object of interest.

[0017] The present invention also provides antigens of polypeptides comprising an epitope. The present invention also provides kits, compositions and methods for diagnosing an allergy, comprising such a polypeptide. The present invention also provides methods for providing an indicator for diagnosing an allergy in a subject. The present invention also provides compositions comprising such a polypeptide, and raw materials or processed products in which an antigen comprising such a polypeptide is eliminated or reduced. The present invention further relates to methods for producing a raw material and a processed product in which such an antigen is eliminated or reduced. The present invention further relates to tester compositions for determining the presence or absence of an antigen comprising such a polypeptide in an object of interest.

### Solution to Problem

[0018] In order to solve the aforementioned problems, the present inventors had made intensive studies to identify causative antigens of an allergy to wheat. As a result, the inventors succeeded in identifying novel antigens of proteins to which an IgE antibody in the serum of a patient who is allergic to wheat specifically binds.

[0019] Since the epitopes have a relatively short amino acid sequence, the IgE antibodies are capable of binding to different allergen components if the same amino acid sequence is present in the different allergen components. Because different allergen components have a common epitope so that IgE antibodies from allergic patients bind to both of them, the antigens have cross-reactivity. Thus, the epitopes defined in the present invention enable diagnosis or treatment of an allergy including cross-reactivity, and detection of a plurality of allergen components comprising the epitopes, etc.

[0020] As referred to herein, the “antigen” is used in meanings including both an antigen in a narrow sense which is a protein and an “epitope” derived from the protein, unless otherwise specified. The “antigen” is used in any meaning of the protein or the epitope derived from the protein as specified.

[0021] The present invention has been completed based on the aforementioned finding. The present invention includes the following embodiments, but the present invention is not limited to them.

[Embodiment 1] A kit for diagnosing an allergy, comprising at least one of the following polypeptides (E1) to (E50):
[0022] (E1) a polypeptide comprising at least one amino acid sequence selected from the amino acid sequences of SEQ ID NOs: 29-130 and 2880;
[0023] (E2) a polypeptide comprising at least one amino acid sequence selected from the amino acid sequences of SEQ ID NOs: 131-137 and 139-190;
[0024] (E3) a polypeptide comprising at least one amino acid sequence selected from the amino acid sequences of SEQ ID NOs: 191-280 (except for 227, 259, 269 and 273) and 2881;
[0025] (E4) a polypeptide comprising at least one amino acid sequence selected from the amino acid sequences of SEQ ID NOs: 281-341 and 343-345;
[0026] (E5) a polypeptide comprising at least one amino acid sequence selected from the amino acid sequences of SEQ ID NOs: 346-398, 400-413 and 2882;
[0027] (E6) a polypeptide comprising at least one amino acid sequence selected from the amino acid sequences of SEQ ID NOs: 414-492, 2883 and 2884;
[0028] (E7) a polypeptide comprising at least one amino acid sequence selected from the amino acid sequences of SEQ ID NOs: 493-561;
[0029] (E8) a polypeptide comprising at least one amino acid sequence selected from the amino acid sequences of SEQ ID NOs: 562-639;
[0030] (E9) a polypeptide comprising at least one amino acid sequence selected from the amino acid sequences of SEQ ID NOs: 640-705 and 2885-2888;
[0031] (E10) a polypeptide comprising at least one amino acid sequence selected from the amino acid sequences of SEQ ID NOs: 706-775 and 2889-2891;
[0032] (E11) a polypeptide comprising at least one amino acid sequence selected from the amino acid sequences of SEQ ID NOs: 776-898 and 2892;
[0033] (E12) a polypeptide comprising at least one amino acid sequence selected from the amino acid sequences of SEQ ID NOs: 899-973, 2893 and 2895;
[0034] (E13) a polypeptide comprising at least one amino acid sequence selected from the amino acid sequences of SEQ ID NOs: 974-1009;
[0035] (E14) a polypeptide comprising at least one amino acid sequence selected from the amino acid sequences of SEQ ID NOs: 1010-1088 and 2896-2899;
[0036] (E15) a polypeptide comprising at least one amino acid sequence selected from the amino acid sequences of SEQ ID NOs: 1089-1141;
[0037] (E16) a polypeptide comprising at least one amino acid sequence selected from the amino acid sequences of SEQ ID NOs: 1142-1165 and 2900;
[0038] (E17) a polypeptide comprising at least one amino acid sequence selected from the amino acid sequences of SEQ ID NOs: 1166-1208;
[0039] (E18) a polypeptide comprising at least one amino acid sequence selected from the amino acid sequences of SEQ ID NOs: 1209-1256;
[0040] (E19) a polypeptide comprising at least one amino acid sequence selected from the amino acid sequences of SEQ ID NOs: 1257-1296;
[0041] (E20) a polypeptide comprising at least one amino acid sequence selected from the amino acid sequences of SEQ ID NOs: 1297-1366;
[0042] (E21) a polypeptide comprising at least one amino acid sequence selected from the amino acid sequences of SEQ ID NOs: 1367-1402;
[0043] (E22) a polypeptide comprising at least one amino acid sequence selected from the amino acid sequences of SEQ ID NOs: 1403-1507;
[0044] (E23) a polypeptide comprising at least one amino acid sequence selected from the amino acid sequences of SEQ ID NOs: 1508-1565 and 2901;
[0045] (E24) a polypeptide comprising at least one amino acid sequence selected from the amino acid sequences of SEQ ID NOs: 1566-1597;
[0046] (E25) a polypeptide comprising at least one amino acid sequence selected from the amino acid sequences of SEQ ID NOs: 1598-1607;
[0047] (E26) a polypeptide comprising at least one amino acid sequence selected from the amino acid sequences of SEQ ID NOs: 1608-1684, 2902 and 2903;
[0048] (E27) a polypeptide comprising at least one amino acid sequence selected from the amino acid sequences of SEQ ID NOs: 1685-1752, 2904 and 2905;
[0049] (E28) a polypeptide comprising at least one amino acid sequence selected from the amino acid sequences of SEQ ID NOs: 1753-1788, 2906 and 2907;
[0050] (E29) a polypeptide comprising at least one amino acid sequence selected from the amino acid sequences of SEQ ID NOs: 1789-1835, 2908 and 2909;
[0051] (E30) a polypeptide comprising at least one amino acid sequence selected from the amino acid sequences of SEQ ID NOs: 1836-1894, 2910 and 2911;
[0052] (E31) a polypeptide comprising at least one amino acid sequence selected from the amino acid sequences of SEQ ID NOs: 1895-1976, 2912 and 2913;
[0053] (E32) a polypeptide comprising at least one amino acid sequence selected from the amino acid sequences of SEQ ID NOs: 1977-2003;
[0054] (E33) a polypeptide comprising at least one amino acid sequence selected from the amino acid sequences of SEQ ID NOs: 2004-2026;
[0055] (E34) a polypeptide comprising at least one amino acid sequence selected from the amino acid sequences of SEQ ID NOs: 2027-2067 and 2914;
[0056] (E35) a polypeptide comprising at least one amino acid sequence selected from the amino acid sequences of SEQ ID NOs: 2068-2153, 2915 and 2916;
[0057] (E36) a polypeptide comprising at least one amino acid sequence selected from the amino acid sequences of SEQ ID NOs: 2154-2216;
[0058] (E37) a polypeptide comprising at least one amino acid sequence selected from the amino acid sequences of SEQ ID NOs: 2217-2264 and 2917-2921;
[0059] (E38) a polypeptide comprising at least one amino acid sequence selected from the amino acid sequences of SEQ ID NOs: 2265-2308 and 2922-2925;
[0060] (E39) a polypeptide comprising at least one amino acid sequence selected from the amino acid sequences of SEQ ID NOs: 2309-2341;
[0061] (E40) a polypeptide comprising at least one amino acid sequence selected from the amino acid sequences of SEQ ID NOs: 2342-2418;
[0062] (E41) a polypeptide comprising at least one amino acid sequence selected from the amino acid sequences of SEQ ID NOs: 2419-2490;
[0063] (E42) a polypeptide comprising at least one amino acid sequence selected from the amino acid sequences of SEQ ID NOs: 2491-2544, 2926 and 2927;
[0064] (E43) a polypeptide comprising at least one amino acid sequence selected from the amino acid sequences of SEQ ID NOs: 2545-2612;
[0065] (E44) a polypeptide comprising at least one amino acid sequence selected from the amino acid sequences of SEQ ID NOs: 2613-2630;
[0066] (E45) a polypeptide comprising at least one amino acid sequence selected from the amino acid sequences of SEQ ID NOs: 2631-2673;
[0067] (E46) a polypeptide comprising at least one amino acid sequence selected from the amino acid sequences of SEQ ID NOs: 2674-2700 and 2928;
[0068] (E47) a polypeptide comprising at least one amino acid sequence selected from the amino acid sequences of SEQ ID NOs: 2701-2773 and 2929;
[0069] (E48) a polypeptide comprising at least one amino acid sequence selected from the amino acid sequences of SEQ ID NOs: 2774-2808, 2930 and 2931;
[0070] (E49) a polypeptide comprising at least one amino acid sequence selected from the amino acid sequences of SEQ ID NOs: 2809-2829; and
[0071] (E50) a polypeptide comprising at least one amino acid sequence selected from the amino acid sequences of SEQ ID NOs: 2830-2879 and 2932.
   [Embodiment 2] A composition for diagnosing an allergy, the composition comprising at least one of polypeptides (E1) to (E50) according to Embodiment 1.
   [Embodiment 3] A method for providing an indicator for diagnosing an allergy in a subject, the method comprising the steps of:
[0072] (i) contacting a sample obtained from the subject with an antigen, wherein the sample is a solution comprising an IgE antibody;
[0073] (ii) detecting binding between the IgE antibody present in the sample obtained from the subject and the antigen; and
[0074] (iii) when the binding between the IgE antibody in the subject and the antigen is detected, an indicator of the fact that the subject is allergic is provided;
[0075] wherein the antigen is at least one of polypeptides (E1) to (E50) according to Embodiment 1.
   [Embodiment 4] An antigen which is at least one of polypeptides (E1) to (E50) according to Embodiment 1 and is causative of an allergy.
   [Embodiment 5] A composition comprising at least one antigen according to Embodiment 4.
   [Embodiment 6] The composition according to Embodiment 5, wherein the composition is intended for the treatment of an allergy.
   [Embodiment 7] A tester composition for determining the presence or absence of an antigen in a subject, the tester composition comprising an antibody that binds to at least one of polypeptides (E1) to (E50) according to Embodiment 1.
   [Embodiment 8] A tester composition for determining the presence or absence of an antigen in an object of interest, the tester composition comprising at least one primer comprising a portion of the nucleotide sequence of a nucleic acid encoding any of polypeptides (E1) to (E50) according to Embodiment 1, and/or a portion of a complementary strand thereof.
   [Embodiment 9] A tester composition for determining the presence or absence of an IgE antibody in a subject, the tester composition comprising polypeptides (E1) to (E50) according to Embodiment 1.
   [Embodiment 10] A method for determining the presence or absence of polypeptides (E1) to (E50) according to Embodiment 1 in a raw material or a processed product, comprising detecting the polypeptides (E1) to (E50) according to Embodiment 1 in the raw material or the processed product.
   [Embodiment 11] A raw material or a processed product in which an antigen is eliminated or reduced, wherein the antigen is at least one of polypeptides (E1) to (E50) according to Embodiment 1.
   [Embodiment 12] A method for producing a raw material or a processed product in which an antigen is eliminated or reduced, the method comprising the step of confirming that the antigen is eliminated or reduced, in a production process of the processed product, wherein the antigen is at least one of polypeptides (E1) to (E50) according to Embodiment 1.

### Advantageous Effects of Invention

[0076] The present invention can provide novel antigens of an allergy (e.g., an allergy to wheat). Since the novel allergen components that trigger an allergy were identified according to this invention, this invention can provide highly sensitive methods and kits for diagnosing an allergy, compositions comprising such an antigen, raw materials or processed products in which such an antigen is eliminated or reduced, and tester compositions for determining the presence or absence of an antigen in an object of interest.

[0077] The present invention can provide antigens of novel polypeptides comprising an epitope of a protein antigen. Use of the polypeptide of the present invention enables provision of highly sensitive kits, compositions and methods for diagnosing an allergy (e.g., an allergy to wheat), compositions comprising such a polypeptide, tester compositions for determining the presence or absence of an antigen comprising such a polypeptide in an object of interest, and raw materials or processed products in which such a polypeptide is eliminated or reduced, and a method for producing the raw materials and the processed products.

### BRIEF DESCRIPTION OF DRAWINGS

[0078] FIG. 1 is a photograph of a gel showing a protein electrophoretic pattern in two-dimensional electrophoresis of proteins contained in wheat. The bands at the left of the photograph are bands of molecular weight markers, and the numeric values at the left of the photograph are respective molecular weights (KDa) of the molecular weight markers. The numeric values at the top of the photograph represent isoelectric points.

[0079] FIG. 2 is a photograph of an immunoblot of a two-dimensional electrophoretic pattern of proteins contained in wheat stained with serum of a wheat-allergic patient. Spots 1 to 16 where an IgE antibody in the serum of the wheat-allergic patient specifically reacted as compared with healthy subjects are each enclosed in a white line. WDEIA cases in wheat-allergic patients are represented by P2 to P36, children of cases with general immediate type allergy to wheat, which requires no exercise for its development, are represented by P50 to P57, and adults are represented by G1 to G9.

[0080] FIG. 3 shows results of examining cross-reactivity of peptides having the amino acid sequence of each epitope by ELISA using serum of a patient associated with an allergy to wheat.

[0081] FIG. 4 shows results of examining cross-reactivity of peptides having the amino acid sequence of each epitope by ELISA using serum of a patient associated with an allergy to wheat.

[0082] FIG. 5 shows results of examining cross-reactivity of peptides having the amino acid sequence of each epitope by ELISA using serum of a patient associated with an allergy to wheat.

[0083] FIG. 6 shows results of examining cross-reactivity of peptides having the amino acid sequence of each epitope by ELISA using serum of a patient associated with an allergy to wheat.

### DESCRIPTION OF EMBODIMENTS

[0084] The present invention will be described in detail below, but the present invention is not limited to them.

[0085] Unless otherwise defined herein, all scientific and technical terms used in relation to the present invention shall have meanings commonly understood by those skilled in the art.

[0086] As referred to herein, the “allergy” refers to the state in which, when a certain antigen enters the body of a living individual sensitized to said antigen, the living individual shows a hypersensitive reaction detrimental to him/her. An allergic reaction can be produced upon contact with an antigen or consumption of the antigen. Here, the contact refers to touch to an object and, particularly, as for the human body, refers to attachment to the skin, the mucosa (eyes, lips, etc.) or the like. The consumption refers to incorporation into the body and refers to incorporation by inhalation or through an oral route, etc. In general, allergic reactions caused by consumption of foods are particularly referred to as food allergies. In a preferred embodiment, the allergy may be a food allergy. In blood and tissues of individuals with many food-allergic diseases, IgE antibodies specific to antigens are produced. IgE antibodies bind to mast cells or basophils. When an antigen specific to such an IgE antibody enters again the body of a patient with an allergic disease, said antigen combines with the IgE antibody bound to mast cells or basophils, resulting in physiological effects of IgE antibody-antigen interaction. Examples of such physiological effects include release of histamine, serotonin, heparin, eosinophil chemotactic factors, leucotrienes, or the like. These released substances provoke an allergic reaction resulting from the combination of an IgE antibody with particular antigens. Specifically, IgE antibodies recognize and bind to epitopes that are particular amino acid sequences in particular antigens. Allergic reactions caused by such antigens occur through the aforementioned pathway.

[0087] In the present invention, the allergy of interest is not particularly limited as long as it is an allergy to an allergen (antigen) comprising an epitope to be used. In one embodiment, the allergen includes grain, seafood, fruits, vegetables, nuts (seeds), edible grass, meat, milk, dairy products and the like that are consumed by living individuals (particularly, humans), or parasites and the like that parasitize living individuals (particularly, humans).

[0088] The grain is a generic name for cooking ingredients obtained from plants, and means edible seeds composed mainly of starch. The grain refers to only seeds of crops of the family Poaceae (cereal crops) in a narrow sense and includes these seeds as well as seeds of crops of the family Leguminosae (bean crops) or seeds of crops of other families in a broad sense. As for the grain in the broad sense, dicotyledonous seeds available as grain are collectively called pseudocereals because of their similarity to seeds of cereal crops (seeds of crops of the family Poaceae which are monocotyledonous plants). The pseudocereals include buckwheat (family Polygonaceae), amaranth (family Amaranthaceae), quinua (quinoa; family Chenopodiaceae) and the like.

[0089] In the present invention, the grain of the family Poaceae is not limited and includes bread wheat (Triticum aestivum), barley, rye, oat, timothy, orchard grass, vernal grass, common millet, foxtail millet, Japanese millet, corn, Job's tears and the like. The grain of the family Polygonaceae includes, for example, buckwheat (Fagopyrum esculentum). In one embodiment, an antigen (allergen) is derived from grain. In one embodiment, an allergen is derived from grain of the family Poaceae. In one embodiment, an allergen is derived from wheat.

[0090] The seafood is not limited and includes shrimps, crabs and the like belonging to the order Decapoda. Most of organisms generally recognized as “crustaceans” are included in the order Decapoda. The seafood is not limited and also includes squids and octopuses belonging to the order Teuthida or the order Octopoda. The seafood further includes fishes belonging to the family Scombridae or the family Gadidae. Furthermore, the seafood also includes clams of the family Veneridae.

[0091] The fruits are not limited and include, for example, fruits belonging to the family Actinidiaceae, the family Bromeliaceae, the family Anacardiaceae, the family Cucurbitaceae, the family Musaceae, the family Rutaceae, and the family Rosaceae. The vegetables include, for example, fruits belonging to the family Solanaceae, the family Cucurbitaceae, and the family Lauraceae. The nuts (seeds) include, for example, nuts (seeds) belonging to the family Anacardiaceae, the family Rosaceae, and the family Juglandaceae. The edible grass includes, for example, edible grass belonging to the family Compositae. The grain includes, for example, grain belonging to the family Poaceae and the family Polygonaceae.

[0092] The type of the meat is not particularly limited. In one embodiment, meat of birds (chicken meat, canard viande, etc.), pork, beef, sheep meat, and the like are included therein. In one embodiment, meat of a bird is used. In one embodiment, meat of chicken (Gallus gallus) is used.

[0093] The origin of the milk is not particularly limited. In one embodiment, milk derived from a cow, a goat, sheep or the like is included therein. In one embodiment, milk of a cow (Bos taurus) is used. The dairy products are processed products of milk. The dairy products are not limited and include butter, fresh cream, cheese, yogurt, and ice cream.

[0094] The parasites are not limited and include, for example, parasites of the family Anisakidae. The parasites of the family Anisakidae include anisakis (Anisakis simplex).

[0095] As referred to herein, the allergy refers to the state in which an individual has an allergic reaction caused by proteins, etc. present in raw materials or processed products (e.g., wheat or processed products of wheat)) which act as an antigen. The allergy can produce an allergic reaction upon contact with an antigen contained in raw materials or processed products (e.g., wheat or processed products of wheat) or consumption of the antigen. In general, allergic reactions caused by consumption of foods are particularly referred to as food allergies. The allergy to wheat may be a food allergy.

[0096] As referred to herein, the “antigen” refers to a substance that provokes an allergic reaction. A protein contained in raw materials such as cooking ingredients is also referred to as an allergen component. The antigen is preferably a protein.

[0097] As referred to herein, the protein is a molecule having a structure in which naturally occurring amino acids are joined together by peptide bond. The number of amino acids present in a protein is not particularly limited. As referred to herein, the term “polypeptide” also means a molecule having a structure in which naturally occurring amino acids are joined together by peptide bond. The number of amino acids present in a polypeptide is not particularly limited. The “polypeptide” conceptually includes the “protein”. Also, polypeptides having about 2 to 50 amino acids joined together by peptide bond are in some cases called “peptides”, especially.

[0098] In the case where amino acids can form different enantiomers, the amino acids are understood to form an L-enantiomer, unless otherwise indicated. The amino acid sequences of proteins, polypeptides, or peptides as used herein are represented by one-letter symbols of amino acids in accordance with standard usage and the notational convention commonly used in the art. The leftward direction represents the amino-terminal direction, and the rightward direction represents the carboxy-terminal direction. In the one-letter symbols of amino acids, X can be any substance having an amino group and a carboxyl group that can bind to amino acids at both ends, and particularly represents that any of 20 types of naturally occurring amino acids are acceptable.

[0099] An alanine scanning technique (or an “alanine/glycine scanning” technique) is a method in which variants in which residues in a protein are varied one by one to alanine (or glycine when the original amino acid is alanine) are prepared to identify site-specific residues important for the structure or function of the protein. Residues at positions where binding activity against IgE antibodies from patients remain even after the variation to alanine (or glycine when the original amino acid is alanine) are not important for the binding activity against IgE antibodies, and the binding activity remains even after exchange of these residues with other amino acids. The binding activity against IgE antibodies refers to detected binding and reaction between an epitope of interest and an IgE antibody. The residue of X in the Sequence Listing of the present application is an amino acid residue at a site where binding activity against IgE antibodies from allergic patients remains even after substitution by alanine (or glycine when the original amino acid is alanine) in alanine/glycine scanning described in Example 4. It is well known to those skilled in the art that even when such a site is substituted by any other amino acids, it is highly probable that this binding activity against IgE antibodies remains. Specifically, such a residue can be substituted by not only alanine or glycine but also any given amino acid residue other than alanine.

[0100] The binding and maintenance between IgE and an antigen (an epitope) are important for a subsequent allergic reaction, and this binding and maintenance are brought about by the electric charge, hydrophobic bond, hydrogen bond, and aromatic interaction of the epitope. Binding and maintenance that can be attained even if these are lost by change to alanine or glycine mean that the amino acid is not important.

### Identification of Antigens

[0101] Proteins contained in wheat (bread wheat (Triticum aestivum)) were subjected to two-dimensional electrophoresis under the conditions described below to identify an antigen of an allergy to wheat.

[0102] The electrophoresis in the first dimension was isoelectric focusing, which was performed using isoelectric focusing gels with a gel-strip length of 5 to 10 cm and a gel pH range of 3 to 10. The pH gradient of the gels in the direction of electrophoresis was as follows: when the total gel-strip length is taken as 1, the gel-strip length up to pH 5 is taken as “a”, the gel-strip length from pH 5 to 7 is taken as “b”, and the gel-strip length above pH 7 is taken as “c”, “a” is in the range of 0.15 to 0.3, “b” is in the range of 0.4 to 0.7, and “c” is in the range of 0.15 to 0.3. More specifically, the isoelectric focusing was performed using the IPG gels, Immobiline Drystrip (pH3-10NL), produced by GE Healthcare Bio-Sciences Corporation (hereinafter abbreviated as “GE”). The electrophoresis system used was IPGphor produced by GE. The maximum current of the electrophoresis system was limited to 75 μA per gel strip. The voltage program adopted to perform the first-dimensional isoelectric focusing was as follows: (1) a constant voltage step was performed at a constant voltage of 300 V until the volt-hours reached 750 Vhr (the current variation width during electrophoresis for 30 minutes before the end of this step was 5 μA); (2) the voltage was increased gradually to 1000 V for 300 Vhr; (3) the voltage was further increased gradually to 5000 V for 4500 Vhr; and then (4) the voltage was held at a constant voltage of 5000 V until the total Vhr reached 12000.

[0103] The electrophoresis in the second dimension was SDS-PAGE, which was performed using polyacrylamide gels whose gel concentration at the distal end in the direction of electrophoresis was set to 3 to 6% and whose gel concentration at the proximal end was set to a higher value than that at the distal end. More specifically, the SDS-PAGE was performed using NuPAGE 4-12% Bis-Tris Gels (IPG well, Mini, 1 mm) produced by Life Technologies. The electrophoresis system used was XCell SureLock Mini-Cell produced by Life Technologies. The electrophoresis was run at a constant voltage of 200 V for about 45 minutes using an electrophoresis buffer composed of 50 mM MOPS, 50 mM Tris base, 0.1% (w/v) SDS and 1 mM EDTA.

[0104] As a result, antigens in the following spots 1 to 16 in a two-dimensional electrophoresis gel run under the conditions described above for proteins in wheat have been revealed to specifically bind to IgE antibodies from wheat-allergic patients (FIG. 2).

### Antigen (Protein)

[0105] Sequence identification of the antigen in each spot was performed by mass spectrometry. The mass spectroscopic data obtained on a mass spectrometer was analyzed by comparing the data against the Uniprot protein data. As a result, each of spots 1 to 16 was found to be identical to a known sequence.

[0106] Information on each spot is summarized in Table 1 below.

TABLE 1
MW;35kDa

| SPOT No. | | | (1) |
|---|---|---|---|
| protein | Isoelectric | Range | 5-11 |
| | point | Preferably | 5.5-10 |
| | | More | 6-9 |
| | | preferably | |
| | Molecular | Range | 10-80 |
| | weight | Preferably | 20-60 |
| | | More | 30-50 |
| | | preferably | |
| | Searched DB | | Uniprot |
| | Organism species | | Wheat (Triticum aestivum) |
| | accession No. | | P18573 |
| | Protein name | | alpha/beta gliadin MM1 |
| | | | MKTFLILALLAIVATTARIAVRVPVPQLQPQNPSQQQPQEQVPLVQQQQFPGQ |
| | | | QQPFPPQQPYPQPQPFPSQQPYLQLQPFPQPQLPYPQPQLPYPQPQLPYPQPQPF |
| | Full-length | | RPQQPYPQSQPQYSQPQQPISQQQQQQQQQQQQKQQQQQQQQILQQILQQQL |
| | sequence | | IPCRDVVLQQHSIAYGSSQVLQQSTYQLVQQLCCQQLWQIPEQSRCQAIHNVV |
| | (SEQ ID NO: 2) | | HAIILHQQQQQQQQQQQQPLSQVSFQQPQQQYPSGQGSFQPSQQNPQAQGSV |
| | | | QPQQLPQFEEIRNLALETLPAMCNVYIPPYCTIAPVGIFGTN |
| DNA | Searched DB | | EMBL-EBI |
| | accession No. | | CAA35238.1 |
| | Full-length | | ATGAAGACCTTTCTCATCCTTGCCCTCCTTGCTATTGTAGCAACCACCGCCAGAATTGCA |
| | sequence | | GTTAGAGTTCCAGTGCCACAATTGCAGCCACAAAATCCATCTCAGCAACAACCACAAGAG |
| | (SEQ ID NO: 1) | | CAAGTTCCATTGGTACAACAACAACAATTTCCAGGGCAGCAACAACCATTTCCACCACAA |
| | | | CAGCCATATCCGCAGCCGCAACCATTTCCATCACAACAACCATATCTGCAGCTGCAACCA |
| | | | TTTCCGCAGCCGCAACTACCATATCCGCAGCCGCAACTACCATATCCGCAGCCGCAACTA |
| | | | CCATATCCGCAGCCGCAACCATTTCGACCACAACAACCATATCCACAATCGCAACCACAG |
| | | | TATTCGCAACCACAACAACCAATTTCGCAGCAGCAGCAGCAGCAACAACAACAACAACAA |
| | | | CAAAAACAACAACAACAACAACAACAACAGATCCTTCAACAAATTTTGCAACAACAACTG |
| | | | ATTCCATGCAGGGATGTTGTATTGCAACAACACAGCATAGCGTATGGAAGCTCACAAGTT |
| | | | TTGCAACAAAGTACTTACCAGCTGGTGCAACAATTGTGTTGTCAGCAGCTGTGGCAGATC |
| | | | CCCGAGCAGTCGCGGTGCCAAGCCATCCACAATGTTGTTCATGCTATTATTCTGCATCAA |
| | | | CAGCAACAACAACAACAACAACAACAACAACAACCGTTGAGCCAGGTCTCCTTCCAACAG |
| | | | CCTCAACAACAATATCCATCAGGCCAGGGCTCCTTCCAGCCATCTCAGCAAAACCCACAG |
| | | | GCCCAGGGCTCTGTCCAGCCTCAACAACTGCCCCAGTTTGAGGAAATAAGGAACCTAGCG |
| | | | CTAGAGACGCTACCTGCAATGTGCAATGTCTATATCCCTCCATATTGCACCATTGCTCCA |
| | | | GTTGGCATCTTCGGTACTAAC |

MW;45kDa

| SPOT No. | | | (2) |
|---|---|---|---|
| protein | Isoelectric | Range | 6-12 |
| | point | Preferably | 7-11 |
| | | More | 8-10 |
| | | preferably | |
| | Molecular | Range | 20-100 |
| | weight | Preferably | 25-80 |
| | | More | 30-70 |
| | | preferably | |
| | Searched DB | | Uniprot |
| | Organism species | | Wheat (Triticum aestivum) |
| | accession No. | | V9P767 |
| | Protein name | | LMW-m glutenin subunit 8 |
| | Full-length sequence | | MKTFLIFALLAIAATSAIAQMETSRVPGLEKPWQQQPLPPQQQPPCSQQQQPFP |
| | (SEQ ID NO: 4) | | QQQQPIIILQQSPFSQQQQPVLPQQQPVIILQQPPFSQQQQPVLPQQPPFSQQQQ |
| | | | QQQQQQPPFSQQQQPVLPQQPPFSQQQQPPFSQQQQPSSQQPPFPQQHQQFPQ |
| | | | QQIPVVQPSVLQQLNPCKVFLQQQCSHVAMSQRLARSQMWQQSSCHVMQQQ |
| | | | CCQQLPQIPEQSRSEAIRAIVYSIILQEQQQGFVQPQQQQPQQSGQGVSQHQQQ |
| | | | SQQQQQLGQCSFQQPQQLQQLGQQPQQQQIPQGIFLQPHQISQLEVMTSIALR |
| | | | TLPTMCGVNVPLYSFDPLMPFSIGTGVGGY |
| DNA | Searched DB | | EMBL-EBI |
| | accession No. | | AGU91662.1 |
| | Full-length sequence | | ATGAAGACCTTCCTCATCTTTGCTCTCCTTGCCATTGCGGCGACAAGTGCCATTGCACAA |
| | (SEQ ID NO: 3) | | ATGGAGACTAGCCGCGTCCCTGGTTTGGAGAAACCATGGCAGCAACAACCATTACCACCA |
| | | | CAACAACAACCACCATGTTCACAGCAACAACAACCATTTCCACAGCAACAACAACCAATT |
| | | | ATTATACTGCAACAATCACCATTTTCGCAGCAACAACAACCAGTTCTGCCGCAACAGCAA |
| | | | CCAGTTATTATACTGCAACAACCACCATTTTCGCAGCAACAACAACCAGTTCTACCACAA |
| | | | CAACCACCATTTTCACAACAACAACAACAACAACAACAACAACAACCACCATTTTCGCAG |
| | | | CAACAACAACCAGTTCTACCACAACAACCACCATTTTCACAACAACAACAACCACCATTT |
| | | | TCGCAGCAGCAACAACCATCTTCACAACAACCACCTTTTCCACAACAACACCAACAGTTT |
| | | | CCACAACAACAAATCCCTGTTGTTCAACCATCCGTTTTGCAGCAGCTAAACCCATGCAAG |
| | | | GTGTTCCTCCAACAGCAGTGTAGCCATGTGGCAATGTCGCAACGTCTTGCTAGGTCACAA |
| | | | ATGTGGCAACAGAGTAGTTGCCATGTGATGCAACAACAATGTTGCCAACAGCTGCCGCAA |
| | | | ATCCCCGAACAATCCCGCTCTGAGGCAATCCGTGCCATCGTCTACTCCATCATCCTGCAA |
| | | | GAACAACAACAGGGTTTTGTCCAACCTCAGCAGCAACAACCCCAACAGTCGGGCCAAGGT |
| | | | GTCTCCCAACACCAACAGCAGTCGCAGCAGCAGCAGCAACTCGGACAGTGTTCTTTCCAA |
| | | | CAACCTCAACACTACAACAATTGGGTCAGCAGCCTCAACAACAACAGATACCACAGGGT |
| | | | ATATTCTTGCAGCCACACCAGATATCTCAACTTGAGGTGATGACTTCCATTGCACTCCGT |
| | | | ACCCTGCCAACGATGTGCGGTGTCAACGTGCCGTTGTACAGCTTCGACCCACTTATGCCA |
| | | | TTTAGCATTGGCACTGGAGTTGGTGGCTAC |

MW;35kDa

| SPOT No. | | | (3) |
|---|---|---|---|
| protein | Isoelectric | Range | 5-11 |
| | point | Preferably | 5.5-10 |
| | | More | 6-9 |
| | | preferably | |
| | Molecular | Range | 10-80 |
| | weight | Preferably | 20-60 |
| | | More | 30-50 |
| | | preferably | |
| | Searched DB | | Uniprot |
| | Organism species | | Wheat (Triticum aestivum) |
| | accession No. | | P08453 |
| | Protein name | | gamma-gliadin |
| | Full-length sequence | | MKTLLILTILAMAITIGTANIQVDPSGQVQWLQQQLVPQLQQPLSQQPQQTFP |
| | (SEQ ID NO: 6) | | QPQQTFPHQPQQQVPQPQQPQQPFLQPQQPFPQQPQQPFPQTQQPQQPFPQQP |
| | | | QQPFPQTQQPQQPFPQQPQQPFPQTQQPQQPFPQLQQPQQPFPQPQQQLPQPQ |
| | | | QPQQSFPQQQRPFIQPSLQQQLNPCKNILLQQSKPASLVSSLWSIIWPQSDCQV |
| | | | MRQQCCQQLAQIPQQLQCAAIHSVVHSIIMQQQQQQQQQQGIDIFLPLSQHEQ |
| | | | VGQGSLVQGQGIIQPQQPAQLEAIRSLVLQTLPSMCNVYVPPECSIMRAPFASI |
| | | | VAGIGGQ |
| DNA | Searched DB | | EMBL-EBI |
| | accession No. | | AAA34289.1 |
| | Full-length sequence | | ATGAAGACCTTACTCATCCTGACAATCCTTGCGATGGCAATAACCATCGGCACCGCCAAT |
| | (SEQ ID NO: 5) | | ATCCAGGTCGACCCTAGCGGCCAAGTACAATGGCTACAACAACAACTAGTCCCCCAGCTC |
| | | | CAACAGCCATTATCCCAGCAACCACAACAAACATTTCCCCAACCTCAACAAACATTCCCC |
| | | | CATCAACCACAACAACAAGTTCCCCAGCCTCAGCAACCACAACAACCATTTCTCCAGCCC |
| | | | CAACAACCATTCCCCCAACAACCACAACAACCATTCCCCCAGACTCAACAACCACAACAA |
| | | | CCATTTCCCCAGCAACCACAACAACCATTTCCCCAGACTCAACAACCCCAACAACCATTT |
| | | | CCCCAACAACCACAACAACCATTCCCCCAGACTCAACAACCCCAACAACCATTTCCCCAG |
| | | | CTCCAGCAACCACAACAACCTTTTCCCCAGCCCCAACAACAATTGCCGCAGCCCCAACAA |
| | | | CCGCAACAATCATTCCCCCAACAACAACGGCCATTCATTCAACCATCTCTACAACAACAG |
| | | | TTGAACCCATGCAAGAATATCCTCTTGCAACAATCGAAACCTGCGTCATTGGTGTCATCC |
| | | | CTCTGGTCAATAATCTGGCCACAAAGCGATTGCCAAGTGATGCGGCAACAATGCTGCCAA |
| | | | CAACTAGCACAGATTCCTCAACAGCTCCAGTGCGCAGCCATCCATAGCGTCGTGCATTCC |
| | | | ATCATCATGCAGCAGCAGCAGCAACAACAACAACAACAAGGCATCGATATCTTTCTGCCA |
| | | | CTATCTCAGCACGAACAGGTGGGTCAAGGTTCTCTAGTCCAGGGCCAGGGCATCATCCAA |
| | | | CCACAACAACCAGCTCAATTGGAGGCGATCAGATCATTGGTGTTGCAAACTCTTCCATCC |
| | | | ATGTGCAACGTGTATGTCCCACCTGAGTGCTCCATCATGAGGGCACCATTTGCCAGCATA |
| | | | GTCGCGGGCATTGGTGGCCAA |

MW;40kDa

| SPOT No. | | | (4) |
|---|---|---|---|
| protein | Isoelectric | Range | 5-11 |
| | point | Preferably | 5.5-10 |
| | | More | 6-9 |
| | | preferably | |
| | Molecular | Range | 10-80 |
| | weight | Preferably | 20-60 |
| | | More | 30-50 |
| | | preferably | |
| | Searched DB | | Uniprot |
| | Organism species | | Wheat (Triticum aestivum) |
| | accession No. | | W5CCA9 |
| | Protein name | | Fructose-bisphosphate aldolase |
| | Full-leneth sequence | | DELIKNAAYIGTPGKGILAADESTGTIGKREASINVENVEDNRRALRELLECTP |
| | (SEQ ID NO: 8) | | GALQYLSGVILFEETLYQSTKGGKPFVDILKAGNVLPGIKVDKGTIELAGTNGE |
| | | | TTTQGEDDLGKRCAKYYEAGAREAKWRAVLKIGATEPSQLSIDQNAQGLARY |
| | | | AIICQENGLVPIVEPEILVDGPHDIDRCAYVTEIVLAACYKALNDQHVLLEGTL |
| | | | LKPNMVTPGSDAKKVAPEVIAEYTVRTLQRTVPAAVPAIVELSGGQSEEEATL |
| | | | NLNAMNKLQTKKPWNLSESEGRALQQSTLKAWSGKTENEEKARTAELVRCK |
| | | | ANSEATLGTYKGDATLGEGASESLHVKDYKY |
| DNA | Searched DB | | GenBank |
| | accession No. | | KY930455.1 |
| | Full-length sequence | | gatgagctcatcaagaacgctgcctacattggcacccctggcaagggtatcctcgctgctgatgagtccaccggcaccatcggcaagcgcttcgccagcatcaat |
| | (SEQ ID NO: 7) | | gttgagaacgttgaggacaaccgccgtgccctccgtgagctcctcttctgcacccctggtgccctccagtacctcagcggtgtgatcctcttcgaggagaccctgt |
| | | | accagagcaccaagggtggcaagcccttcgtcgacatcctcaaggcgggcaatgtcctccccggaatcaaggtggacaagggtaccatcgagcttgctggaac |
| | | | caacggtgagaccaccacccagggattgatgaccttggcaagcgctgcgccaagtactatgaggctggtgcccgcttcgccaagtggcgtgcagtccttaaga |
| | | | tcggcgccaccgagccatcacagctctccatcgaccagaacgctcagggtctggctcgctatgccatcatctgccaggagaatgggctggtgcccattgttgagc |
| | | | ctgagatccttgagatggacctcatgacattgaccgctgtgcttacgtgactgagatcgtccttgctgcctgctacaaggccctcaacgaccagcatgtcctccttg |
| | | | agggcaccctcctgaagcccaacatggtcacccctggatccgacgccaagaaggtggcccctgaggtgattgctgagtacaccgtccgcaccctccagagga |
| | | | ccgtccctgctgccgtccccgccattgtcttcctctccggtggacagagtgaggaggaggcgaccctgaacctgaacgccatgaacaagctccagaccaagaa |
| | | | gccctggaacctgtccttctccttcgggcgtgccctccagcagagcaccctcaaggcctggtccggcaagacggagaacgaggagaaggccaggacggcgtt |
| | | | cctggtgaggtgcaaggccaactccgaggccaccatggcacctacaagggcgacgccaccatggcgagggcgcctctgagagcctccacgtcaaggacta |
| | | | caagtac |

mw;38kDa

| SPOT No. | | | (5) |
|---|---|---|---|
| protein | Isoelectric | Range | 5-11 |
| | point | Preferably | 6-10 |
| | | More | 7-9 |
| | | preferably | |
| | Molecular | Range | 10-80 |
| | weight | Preferably | 20-60 |
| | | More | 30-50 |
| | | preferably | |
| | Searched DB | | Uniprot |
| | Organism species | | Wheat (Triticum aestivum) |
| | accession No. | | Q1WA40 |
| | Protein name | | Alpha-gliadin Gli2-LM2-12 |
| | | | MKTFLILALLAIVATTATTAVRVPVPQLQPQNPSQQQPQEQVPLVQQQQFPGQ |
| | | | QQQFPPQQPYPQPQPFPSQQPYLQLQPFPQPQPFPPQLPYPQPQSFPPQQPYPQQ |
| | | | QPQYLQPQQPISQQQAQQQQQQQQQQQQQQQILQQILQQQLIPCRDVVLQQH |
| | | | NIAHASSQVLQQSTYQLLQQLCCQQLLQIPEQSRCQAIHNVAHAIIMHQQQQQ |
| | | | QQEQQQQLQQQQQQQLQQQRQQPSSQVSFQQPQQQYPSSQVSFQPSQLNPQA |
| | | | QGPVQPQQLPQFAEIRNLALQTLPAMCNVYIPPHCSTTIAPFGIFGTN |
| DNA | Searched DB | | EMBL-EBI |
| | accession No. | | ABD85198.1 |
| | Full-length sequence | | ATGAAGACCTTTCTCATCCTTGCCCTCCTTGCTATCGTGGCGACCACCGCCACAACTGCA |
| | (SEQ ID NO: 9) | | GTTAGAGTTCCAGTGCCACAATTGCAGCCACAAAATCCATCTCAGCAACAGCCACAAGAG |
| | | | CAAGTTCCATTGGTACAACAACAACAATTTCCAGGGCAGCAACAACAATTTCCACCACAA |
| | | | CAGCCATATCCGCAGCCGCAACCATTTCCATCACAACAACCATATCTGCAACTGCAGCCA |
| | | | TTTCCGCAGCCGCAACCATTTCCGCCACAACTACCATATCCGCAGCCGCAATCATTTCCA |
| | | | CCACAACAACCATATCCACAACAGCAACCACAGTATCTACAACCACAACAACCAATTTCG |
| | | | CAGCAACAAGCACAACAACAACAACAACAACAACAACAACAACAACAACAACAACAAATC |
| | | | CTTCAACAAATTTTGCAACAACAACTGATTCCATGCAGGGATGTTGTCTTGCAACAACAC |
| | | | AACATAGCGCATGCAAGCTCACAAGTTTTGCAACAAAGTACTTACCAGCTATTGCAACAA |
| | | | TTGTGTTGTCAACAACTGTTGCAGATCCCTGAGCAGTCGAGGTGCCAAGCCATCCATAAT |
| | | | GTTGCTCATGCTATTATTATGCATCAACAACAACAACAACAACAAGAACAACAACAACAG |
| | | | TTGCAACAACAACAACAGCAGCAACTGCAACAACAACGACAACAACCGTCGAGCCAGGTC |
| | | | TCCTTCCAACAGCCTCAGCAGCAATATCCATCAAGCCAGGTCTCCTTCCAGCCATCTCAG |
| | | | CTAAACCCACAGGCTCAGGGCCCCGTCCAACCTCAACAACTGCCCCAGTTCGCGGAAATA |
| | | | AGGAACCTAGCGCTACAGACGCTACCTGCAATGTGCAATGTCTACATCCCTCCACATTGC |
| | | | TCGACCACCATTGCGCCATTTGGCATCTTCGGTACCAAC |

MW;35kDa

| SPOT No. | | | (6) |
|---|---|---|---|
| protein | Isoelectric | Range | 5-11 |
| | point | Preferably | 5.5-10 |
| | | More | 6-9 |
| | | preferably | |
| | Molecular | Range | 10-80 |
| | weight | Preferably | 20-60 |
| | | More | 30-50 |
| | | preferably | |
| | Searched DB | | Uniprot |
| | Organism species | | Wheat (Triticum aestivum) |
| | accession No. | | A0A0E3Z522 |
| | Protein name | | Alpha-gliadin (Fragment) |
| | Full-length sequence | | MKTFLILALLAIVATTATVAVRVPVPQLQPQNPSQQQPQEQVPLVQQQQFPGQ |
| | (SEQ ID NO: 12) | | QQPFPPQQPYPQPQPFPSQQPYLQLQPFPQPQLPYPQPQPFRPQQPYPQPQPQY |
| | | | SQPQQPISQQQQQQQQQQQQQQQQQQQQPQQILQQILQQQLIPCMYVVLQQH |
| | | | SIAQGRSQVLQQSTYQLLQELCCQHLWQIPEQSQCQAIHNVVHAIILHQQQKQ |
| | | | QQQQQQQPSSQVSFQQPQQQYPLGQGSFRPSQQNPQAQGSVQPQQLPQFEEIR |
| | | | NLALQTLPAICNVYIPPYCTIAPFGIFGTN |
| DNA | Searched DB | | EMBL-EBI |
| | accession No. | | AKC91154.1 |
| | Full-length sequence | | ATGAAGACCTTTCTCATCCTTGCCCTCCTTGCTATTGTAGCAACCACCGCCACAGTTGCA |
| | (SEQ ID NO: 11) | | GTTAGAGTTCCAGTGCCACAATTGCAGCCACAAAATCCATCTCAGCAACAACCACAAGAG |
| | | | CAAGTTCCATTGGTACAACAACAGCAATTTCCAGGGCAGCAACAACCATTTCCACCACAA |
| | | | CAGCCATATCCGCAGCCGCAACCATTTCCATCACAACAACCATATCTGCAGCTGCAACCA |
| | | | TTTCCGCAGCCGCAACTACCATATCCGCAGCCGCAACCATTTCGACCACAACAACCATAT |
| | | | CCACAACCGCAACCACAGTATTCGCAACCACAACAACCAATTTCACAGCAGCAGCAGCAG |
| | | | CAGCAGCAGCAGCAACAACAACAACAACAACAACAACAACAACAACCACAACAAATCCTT |
| | | | CAACAAATTTTGCAACAACAACTGATTCCATGCATGTATGTTGTATTGCAGCAACACAGC |
| | | | ATAGCGCAAGGAAGATCACAAGTTTTGCAACAAAGTACTTACCAGCTGTTGCAAGAATTG |
| | | | TGTTGTCAGCACCTATGGCAGATCCCTGAGCAGTCGCAGTGCCAGGCCATCCACAATGTT |
| | | | GTTCATGCTATTATTCTGCATCAACAACAAAAACAACAACAACAACAACAACAACAACCA |
| | | | TCGAGTCAGGTCTCCTTCCAACAGCCTCAGCAACAATATCCATTAGGCCAGGGCTCCTTC |
| | | | CGGCCATCTCAGCAAAACCCACAGGCCCAGGGCTCTGTCCAGCCTCAACAACTGCCCCAG |
| | | | TTCGAGGAAATAAGGAACCTAGCGCTACAGACACTACCTGCAATTTGCAATGTCTACATC |
| | | | CCTCCATATTGCACCATCGCGCCATTTGGCATCTTCGGTACTAAC |

MW;45kDa

| SPOT No. | | | (7) |
|---|---|---|---|
| protein | Isoelectric | Range | 6-12 |
| | point | Preferably | 7-11 |
| | | More | 8-10 |
| | | preferably | |
| | Molecular | Range | 20-100 |
| | weight | Preferably | 25-80 |
| | | More | 30-70 |
| | | preferably | |
| | Searched DB | | Uniprot |
| | Organism species | | Wheat (Triticum aestivum) |
| | accession No. | | M9TG60 |
| | Protein name | | Gamma-gliadin 1 |
| | Full-length sequence | | MKTLLILTIIAVALTTTTANIQVDPSGQVQWPQQQQPFPQPQQPFSQQPQQIFP |
| | (SEQ ID NO: 14) | | QPQQTFPHQPQQAFPQPQQTFPHQPQQQFPQPQQPQQPFPQQPQQQFPQPQQP |
| | | | QQPFPQQPQQQFPQPQQPQQPFPQPQQPQLPFPQQPQQPFPQPQQPQQPFPQLQ |
| | | | QPQQPLPQPQQPQQPFPQQQQPLIQPYLQQQMNPCKNYLLQQCNPVSLVSSLV |
| | | | SMILPRSDCKVMRQQCCQQLAQIPQQLQCAAIHGIVHSIIMQQEQQQQQQQQ |
| | | | QQQQQQQGIQIMRPLFQLVQGQGIIQPQQPAQLEVIRSLVLGTLPTMCNVFVPP |
| | | | ECSTTKAPFASIVADIGGQ |
| DNA | Searched DB | | EMBL-EBI |
| | accession No. | | AGJ50340.1 |
| | Full-length sequence | | ATGAAGACCTTACTCATCCTGACAATCATTGCGGTGGCACTAACTACCACCACCGCCAAT |
| | (SEQ ID NO: 13) | | ATACAGGTCGACCCTAGTGGCCAAGTACAATGGCCACAACAACAACAACCATTCCCCCAG |
| | | | CCCCAACAACCATTCTCCCAACAACCACAACAAATTTTTCCCCAACCCCAACAAACATTC |
| | | | CCCCATCAACCACAACAAGCATTTCCCCAACCCCAACAAACATTCCCCCATCAACCACAA |
| | | | CAACAATTTCCCCAGCCCCAGCAACCACAACAACCATTTCCCCAGCAACCACAACAACAA |
| | | | TTTCCCCAGCCCCAACAACCACAACAACCATTTCCCCAGCAACCACAACAACAATTTCCC |
| | | | CAGCCCCAACAACCACAACAACCATTTCCCCAGCCCCAACAACCCCAACTACCATTTCCG |
| | | | CAACAACCACAACAACCATTCCCCCAGCCTCAACAACCCCAACAACCATTTCCCCAGTTA |
| | | | CAGCAACCACAACAACCTTTACCCCAGCCCCAACAACCGCAACAACCATTCCCCCAGCAA |
| | | | CAACAACCATTGATTCAGCCATACCTACAACAACAGATGAACCCCTGCAAGAATTACCTC |
| | | | TTGCAGCAATGCAACCCTGTGTCATTGGTGTCATCCCTCGTGTCAATGATCTTGCCACGA |
| | | | AGTGATTGCAAGGTGATGCGGCAACAATGTTGCCAACAACTAGCACAGATTCCTCAGCAG |
| | | | CTCCAGTGCGCAGCCATCCATGGCATCGTGCATTCCATCATCATGCAGCAAGAACAACAA |
| | | | CAACAACAACAACAACAACAACAACAACAACAACAACAAGGCATACAGATCATGCGGCCA |
| | | | CTATTTCAGCTCGTCCAGGGTCAGGGCATCATCCAACCTCAACAACCAGCTCAATTGGAG |
| | | | GTGATCAGGTCATTGGTATTGGGAACTCTTCCAACCATGTGCAACGTGTTTGTTCCACCT |
| | | | GAGTGCTCCACCACCAAGGCACCATTTGCCAGCATAGTCGCCGACATTGGTGGCCAA |

MW;35kDa

| SPOT No. | | | (8) |
|---|---|---|---|
| protein | Isoelectric | Range | 6-12 |
| | point | Preferably | 7-11 |
| | | More | 8-10 |
| | | preferably | |
| | Molecular | Range | 10-80 |
| | weight | Preferably | 20-60 |
| | | More | 30-50 |
| | | preferably | |
| | Searched DB | | Uniprot |
| | Organism species | | Wheat (Triticum aestivum) |
| | accession No. | | I0IT53 |
| | Protein name | | Alpha/beta-gliadin |
| | Full-length sequence | | MKTFLILALLAIVATTTTTAVRVPVPQLQPQNPSQQQPQEQVPLVQQQQFLGQ |
| | (SEQ ID NO: 16) | | QQQQFPGQQQPFPPQQPYPQPQPFLPQLPYPQPQPFPPQQSYPQPQPQYPQPQQ |
| | | | PISQQQAQLQQQQQQQQQQQQQILQQILQQQLIPCRDVVLQQPNIAHASSKVS |
| | | | QQSYQLLQQLCCLQLWQTPEQSRCQAIHNVIHAIILHHQQQQQQQQQQQQQQ |
| | | | QQPSSQVSYQQPQQQYPSGQGFFQPSQQNPQAQGFVQPQQLPQFEEIRNLALQ |
| | | | TLPAMCNVYIPPYCSTTIAPFGIMSTN |
| DNA | Searched DB | | EMBL-EBI |
| | accession No. | | ATL17022.1 |
| | Full-length sequence | | ATGAAGACCTTTCTCATCCTTGCCCTCCTTGCTATCGTGGCGACCACCACCACAACTGCA |
| | (SEQ ID NO: 15) | | GTTAGAGTTCCAGTGCCACAATTGCAGCCACAAAATCCATCTCAGCAACAACCACAAGAG |
| | | | CAAGTTCCATTGGTGCAACAACAACAATTTCTAGGGCAGCAACAACAACAATTTCCAGGG |
| | | | CAACAACAACCATTTCCACCACAACAGCCATATCCGCAGCCGCAACCATTTCTGCCACAA |
| | | | CTACCATATCCGCAGCCGCAACCATTTCCACCACAACAATCATATCCACAACCACAACCA |
| | | | CAATATCCGCAACCACAACAACCAATTTCGCAGCAACAAGCACAACTACAACAACAACAA |
| | | | CAACAACAACAACAACAACAACAACAAATCCTTCAACAAATTCTGCAACAACAACTGATT |
| | | | CCATGCAGGGATGTCGTCTTGCAACAACCCAATATAGCACATGCAAGCTCAAAAGTATCG |
| | | | CAACAAAGTTACCAACTGTTGCAACAATTATGTTGTCTGCAACTGTGGCAGACCCCCGAG |
| | | | CAGTCACGGTGCCAAGCCATCCACAATGTCATTCATGCTATTATTTTGCATCATCAACAA |
| | | | CAACAACAACAACAACAACAACAACAACAACAACAACAACAACCGTCGAGCCAGGTCTCC |
| | | | TACCAGCAGCCTCAGCAACAATATCCATCAGGCCAGGGCTTCTTCCAGCCATCTCAGCAA |
| | | | AACCCACAGGCCCAGGGCTTTGTCCAACCTCAGCAACTGCCGCAGTTCGAGGAAATAAGG |
| | | | AACCTAGCGCTGCAGACGCTACCAGCAATGTGCAATGTCTACATCCCTCCATATTGCTCG |
| | | | ACCACCATTGCGCCATTTGGCATCATGAGTACTAAC |

MW;45kDa

| SPOT No. | | | (9) |
|---|---|---|---|
| protein | Isoelectric | Range | 6-12 |
| | point | Preferably | 7-11 |
| | | More | 8-10 |
| | | preferably | |
| | Molecular | Range | 20-100 |
| | weight | Preferably | 25-80 |
| | | More | 30-70 |
| | | preferably | |
| | Searched DB | | Uniprot |
| | Organism species | | Wheat (Triticum aestivum) |
| | accession No. | | B2BZD1 |
| | Protein name | | LMW-GS |
| | Full-length sequence | | MKTFLIFALLAVAATSAIAQMETSHIPGLEKPSQQQPLPLQQILWYHQQQPIQQ |
| | (SEQ ID NO: 18) | | QPQPFPQQPPCSQQQQPPLSQQQQPPFSQQQPPFSQQELPILPQQPPFSQQQQPQ |
| | | | FSQQQQPFPQQQQPLLLQQPPFSQQRPPFSQQQQQPVLPQQPPFSQQQQQQPIL |
| | | | PQQPPFSQHQQPVLPQQQIPYVQPSILQQLNPCKVFLQQQCSPVAMPQSLARS |
| | | | QMLWQSSCHVMQQQCCQQLPRIPEQSRYDAIRAIIYSIVLQEQQHGQGFNQPQ |
| | | | QQQPQQSVQGVSQPQQQQKQLGQCSFQRPQQQQLGQWPQQQQVPQGTLLQP |
| | | | HQIAQLELMTSIALRTLPMMCSVNVPVYGTTTSVPFGVGTQVGAY |
| DNA | Searched DB | | EMBL-EBI |
| | accession No. | | ABY58134.1 |
| | Full-length sequence | | ATGAAGACCTTCCTCATCTTTGCCCTCCTTGCCGTTGCAGCGACAAGTGCCATTGCACAA |
| | (SEQ ID NO: 17) | | ATGGAGACTAGCCACATCCCTGGCTTGGAGAAACCATCGCAACAACAACCATTACCACTA |
| | | | CAACAAATATTATGGTACCACCAACAGCAACCGATCCAACAACAACCACAACCATTTCCA |
| | | | CAACAGCCACCATGTTCACAGCAACAACAACCACCATTATCGCAGCAACAACAACCACCA |
| | | | TTTTCACAGCAACAACCACCATTCTCGCAGCAAGAACTACCAATTCTACCGCAACAACCA |
| | | | CCATTTTCGCAGCAACAACAACCACAATTTTCGCAGCAACAACAACCATTCCCGCAGCAA |
| | | | CAACAACCACTTCTACTGCAACAACCCCCATTTTCACAACAACGACCACCATTTTCTCAG |
| | | | CAGCAGCAACAACCAGTTCTACCGCAACAACCACCATTTTCGCAACAGCAACAACAACAA |
| | | | CCAATTCTACCGCAACAACCACCTTTTTCGCAACACCAACAACCGGTTCTTCCGCAACAA |
| | | | CAAATACCATATGTTCAGCCATCTATCTTGCAGCAGCTAAACCCATGCAAGGTATTCCTC |
| | | | CAGCAGCAATGCAGCCCTGTGGCAATGCCACAAAGTCTTGCTAGGTCGCAAATGTTGTGG |
| | | | CAGAGCAGTTGCCATGTGATGCAGCAACAATGTTGCCAGCAGCTGCCGCGAATCCCCGAA |
| | | | CAATCACGCTATGATGCAATCCGTGCCATCATCTACTCGATCGTCCTACAAGAACAACAA |
| | | | CATGGTCAGGGTTTCAACCAACCTCAGCAGCAACAACCCCAACAGTCGGTCCAAGGTGTC |
| | | | TCCCAACCCCAACAACAACAGAAGCAGCTCGGACAGTGTTCTTTCCAACGACCTCAACAA |
| | | | CAACAACTGGGTCAATGGCCTCAACAACAACAGGTACCACAGGGTACCTTGTTGCAGCCA |
| | | | CACCAAATAGCTCAACTTGAGTTGATGACTTCCATTGCACTCCGTACCCTGCCAATGATG |
| | | | TGCAGTGTCAACGTGCCGGTGTACGGCACCACCACTAGTGTGCCATTCGGCGTTGGCACC |
| | | | CAAGTTGGTGCCTAC |

MW;55kDa

| SPOT No. | | | (10) |
|---|---|---|---|
| protein | Isoelectric | Range | 5-11 |
| | point | Preferably | 5.5-10 |
| | | More | 6-9 |
| | | preferably | |
| | Molecular | Range | 20-100 |
| | weight | Preferably | 25-80 |
| | | More | 30-70 |
| | | preferably | |
| | Searched DB | | Uniprot |
| | Organism species | | Wheat (Aegilops tauschii) |
| | accession No. | | M8B8C6 |
| | Protein name | | Globulin 1-S allele |
| | Full-lenah sequence | | MKSTVVRSPWLALALVLSLCLSLSFASWDAEDEGRGSRRWQEGGDERRSGES |
| | (SEQ ID NO: 20) | | GRPYHFGEESFREWAKSRHGHFKPSHYDADEIAFVREGEGVLVLLRNGKRES |
| | | | FCVREGDVEVIPAGSIVYSANTHRSKWERVVMLLNPVSTPGSFQEFSPIGEGGE |
| | | | QPQSFFSVESDEVIRAAFNTRQREDVDRVFETKSRGEGQISEGSEEQIRELSRSC |
| | | | SRGGRGGGGGSGSEKEDIQPRSLTGEKPRYSNKHGRFFIQITGDQCHHLRKLD |
| | | | MDVTLVNITRGSMTALRYTTRSTRIYIVVEGRDGYFEMACPHVSSSGRSERRE |
| | | | HEQEREREHGHGRRSEERGQEHGRRSEEEEHGHGGEQEKSRGYRQVRAQIKV |
| | | | GSVIVLPAGHPATEVAGNEGNLALLSEGVGANNDEEVEVTGGNSVLKQLDEA |
| | | | AKALAFPQQARELADRVIRAQPESVFVPGPQQQRRVADM |
| DNA | Searched DB | | EMBL-EBI |
| | accession No. | | EMT09885.1 |
| | Full-length sequence | | ATGAAGTCCACGGTAGTAAGATCGCCATGGCTAGCGCTAGCCCTCGTCCTCTCCCTGTGC |
| | (SEQ ID NO: 19) | | CTCTCCCTCTCGTTCGCGTCGTGGGATGCCGAGGACGAAGGTAGGGGTAGTAGGAGGTGG |
| | | | CAAGAAGGGGGCGACGAAAGGCGGTCCGGCGAAAGTGGCCGGCCGTACCACTTCGGCGAG |
| | | | GAGAGCTTCCGGGAGTGGGCCAAGTCGCGGCACGGCCACTTCAAGCCCAGCCACTACGAC |
| | | | GCCGACGAGATCGCCTTCGTGAGGGAAGGCGAGGGCGTGCTGGTGCTGCTGAGGAACGGG |
| | | | AAGCGGGAGTCGTTCTGCGTCAGGGAGGGCGACGTGTTCGTGATCCCGGCCGGGTCCATC |
| | | | GTGTACTCCGCCAACACGCACCGCTCCAAGTGGTTCCGGGTCGTCATGCTCCTCAACCCC |
| | | | GTCTCCACGCCGGGCAGCTTCCAGGAGTTCTCCCCTATTGGGTTTGGAGGCGAGCAGCCG |
| | | | CAGTCGTTCTTCAGCGTATTCAGCGACGAGGTTATCCGGGCGGCATTTAACACTCGGCAG |
| | | | CGGGAGGATGTGGACAGAGTGTTCGAGACGAAGAGCAGAGGTGAGGGTCAGATATCTGAG |
| | | | GGGTCGGAGGAGCAGATACGGGAGCTGAGCAGGTCGTGCTCCAGGGGAGGACGCGGCGGT |
| | | | GGCGGCGGGTCGGGTTCCGAGAAGGAGGACATCCAGCCGCGCAGCCTCACCGGCGAGAAG |
| | | | CCCCGCTACTCGAACAAGCACGGCAGGTTCCACCAGATCACCGGCGACCAGTGCCACCAC |
| | | | CTCCGCAAGCTCGACATGGATGTCACCCTCGTCAACATTACCCGGGGCTCGATGACGGCG |
| | | | CTGAGGTACACCACCCGGTCGACCAGGATCTACATCGTCGTGGAGGGGCGCGACGGCTAC |
| | | | TTCGAGATGGCGTGCCCGCACGTCTCCAGCTCCGGCCGTTCTGAACGCCGGGAGCACGAG |
| | | | CAGGAGCGCGAGCGCGAACACGGACACGGCAGGAGAAGCGAGGAGCGCGGGCAGGAGCAC |
| | | | GGCAGGAGGAGCGAGGAGGAGGAGCACGGCCACGGCGGCGAGCAGGAGAAATCGAGGGGC |
| | | | TACAGGCAGGTGAGGGCCCAGATCAAGGTGGGGTCGGTGATCGTGCTCCCCGCGGGCCAC |
| | | | CCGGCGACGTTCGTGGCCGGGAACGAGGGGAACCTCGCCCTGCTGTCCTTCGGCGTGGGC |
| | | | GCCAACAACGACGAGGAGGTGTTCGTGACCGGCGGGAACAGCGTGCTGAAGCAGCTGGAC |
| | | | GAGGCAGCCAAGGCGCTGGCGTTCCCCCAGCAGGCGAGGGAGCTGGCGGACAGGGTCATC |
| | | | CGCGCGCAGCCGGAGTCCGTGTTCGTCCCCGGCCCGCAGCAGCAGCGCCGCGTCGCCGAC |
| | | | ATG |

MW;55kDa

| SPOT No. | | | (11) (12) |
|---|---|---|---|
| protein | Isoelectric | Range | 5-12 |
| | point | Preferably | 5.5-11 |
| | | More | 7-10 |
| | | preferably | |
| | Molecular | Range | 20-100 |
| | weight | Preferably | 25-80 |
| | | More | 30-70 |
| | | preferably | |
| | Searched DB | | Uniprot |
| | Organism species | | Wheat (Triticum aestivum) |
| | accession No. | | B7U6L4 |
| | Protein name | | Globulin 3 |
| | Full-length sequence | | MATRARVTIPLLELLGTSLLFAAAVSASHDEEEDRRGGRSLQQCVQRCQQDRP |
| | (SEQ ID NO: 22) | | RYSHARCVQECRDDQQQHGRHEQEEQGRGHGRHGEGEREEEQGRGRGRHG |
| | | | QGEREEEQGRGRGRRGEGERDEEHGDGRRPYVEGPRSERRIIRSDHGEVKALR |
| | | | PFDEVSRLLRGIRNYRVAIMEVNPRAFVVPGLTDADGVGYVAQGEGVLTVIE |
| | | | NGEKRSYTVRQGDVIVAPAGSIMHLANTDGRRKLVIAKILHTISVPGKFQYFS |
| | | | AKPLLASLSKRVLTAALKTSDERLGSLLGSRQGKEEEEKSISIVRASEEQLREL |
| | | | RRQASEGDQGHHWPLPPERGDSRDTENLLEQRPKIANRHGRLYEADARSFHA |
| | | | LAQHDVRVAVANITPGSMTAPYLNTQSFKLAVVLEGEGEVEIVCPHLGRDSE |
| | | | RREQEHGKGRWRSEEEEDDRRQQRRRGSGSESEEEQDQQRYETVRARVSRGS |
| | | | AFVVPPGHPVVEIASSRGSSNLQVVCFE1NAERNERVWLAGRNNVIAKLDDPA |
| | | | QELTFGRPAREVQEVFRAKDQQDEGFVAGPEQQQEHERGDRRRGDRGRGDE |
| | | | AVEAFLRMATAAL |
| DNA | Searched DB | | EMBL-EBI |
| | accession No. | | ACJ65514.1 |
| | Full-length sequence | | ATGGCGACCAGAGCCAGAGTAACCATCCCTCTCCTCTTCCTCCTGGGCACAAGCCTTCTC |
| | (SEQ ID NO: 21) | | TTCGCCGCGGCTGTTTCGGCCTCCCATGACGAGGAGGAGGACAGGCGCGGTGGGCGCTCG |
| | | | CTGCAGCAGTGCGTGCAGCGGTGCCAGCAGGACCGGCCGCGGTACTCTCATGCCCGGTGC |
| | | | GTGCAGGAGTGCCGGGACGACCAGCAGCAGCACGGAAGGCACGAGCAGGAGGAGCAGGGC |
| | | | CGCGGGCATGGCCGGCACGGCGAGGGGGAGCGTGAGGAGGAGCAGGGCCGTGGCCGTGGC |
| | | | CGGCACGGCCAGGGAGAGCGTGAGGAGGAGCAGGGCCGTGGACGTGGGCGGCGCGGCGAG |
| | | | GGAGAGCGTGATGAGGAGCACGGGGATGGCCGGCGGCCGTACGTGTTCGGCCCGCGCAGC |
| | | | TTCCGCCGCATCATCCGGAGCGACCACGGGTTCGTCAAGGCCCTTCGCCCGTTCGACGAA |
| | | | GTGTCCAGGCTCCTCCGGGGCATCAGGAACTACCGTGTCGCCATCATGGAGGTGAACCCG |
| | | | CGCGCGTTCGTCGTGCCGGGACTCACGGACGCGGACGGCGTCGGCTACGTCGCTCAAGGC |
| | | | GAGGGGGTGCTGACGGTGATCGAGAACGGCGAGAAGCGGTCCTACACCGTCAGGCAAGGC |
| | | | GATGTGATCGTGGCGCCGGCGGGGTCCATCATGCACCTGGCCAACACCGACGGCCGGAGG |
| | | | AAGCTGGTCATCGCCAAGATTCTCCACACCATCTCCGTCCCCGGCAAGTTCCAGTATTTC |
| | | | TCGGCCAAGCCTCTCCTCGCTAGTTTGAGCAAACGCGTGCTCACAGCGGCGTTAAAGACC |
| | | | TCGGATGAGCGGCTGGGTAGTCTCTTGGGCAGCCGCCAAGGCAAGGAGGAGGAGGAGAAG |
| | | | TCCATCTCCATCGTCCGCGCGTCAGAGGAGCAGCTCCGCGAGCTGCGTCGCCAGGCGTCC |
| | | | GAGGGTGACCAGGGCCACCACTGGCCTCTCCCCCCGTTCCGCGGCGACTCGCGCGACACC |
| | | | TTCAACCTCCTGGAGCAGCGCCCCAAGATCGCCAACCGCCATGGCCGCCTCTACGAGGCC |
| | | | GACGCCCGTAGCTTCCACGCCCTCGCCCAACACGACGTCCGCGTCGCCGTGGCCAACATC |
| | | | ACGCCGGGTTCTATGACCGCACCCTACCTGAACACCCAGTCGTTCAAGCTCGCCGTTGTG |
| | | | CTGGAAGGCGAGGGCGAGGTGGAGATCGTCTGCCCGCACCTCGGCCGCGACAGCGAGCGC |
| | | | CGCGAGCAAGAGCACGGCAAGGGCAGGTGGAGGAGCGAGGAAGAGGAGGACGACCGGCGG |
| | | | CAGCAACGCCGACGCGGGTCCGGCTCCGAGTCGGAGGAGGAGCAGGACCAGCAGAGGTAC |
| | | | GAGACGGTCCGCGCGCGGGTGTCGCGCGGCTCGGCGTTCGTGGTGCCCCCCGGCCACCCG |
| | | | GTGGTGGAGATCGCCTCGTCCCGCGGCAGCAGCAACCTCCAGGTGGTGTGCTTCGAGATC |
| | | | AACGCCGAGAGGAACGAGCGGGTGTGGCTCGCCGGGAGGAACAACGTGATCGCCAAGCTG |
| | | | GACGACCCCGCCCAGGAGCTCACCTTCGGCAGGCCCGCGAGGGAGGTGCAGGAGGTGTTC |
| | | | CGCGCCAAGGATCAGCAGGACGAGGGCTTCGTCGCCGGACCCGAGCAGCAGCAGGAGCAT |
| | | | GAGCGCGGGGACCGCCGCCGTGGTGACCGCGGGCGCGGCGACGAAGCCGTGGAGGCGTTC |
| | | | CTGAGGATGGCAACCGCCGCGCTC |

MW;55kDa

| SPOT No. | | | (13) |
|---|---|---|---|
| protein | Isoelectric | Range | 6-12 |
| | point | Preferably | 7-11 |
| | | More | 8-10 |
| | | preferably | |
| | Molecular | Range | 20-100 |
| | weight | Preferably | 25-80 |
| | | More | 30-70 |
| | | preferably | |
| | Searched DB | | Uniprot |
| | Organism species | | Wheat (Triticum aestivum) |
| | accession No. | | Q03033 |
| | Protein name | | Elongation Factor 1-alpha |
| | Full-length sequence | | MGKEKTHINIVVIGHVDSGKSTTTGHLIYKLGGIDKRVIERFEKEAAEMNKRSF |
| | (SEQ ID NO: 24) | | KYAWVLDKLKAERERGITIDIALWKFETTKYYCTVIDAPGHRDFIKNMITGTS |
| | | | QADCAVLIIDSTTGGFEAGISKDGQTREHALLAFTLGVKQMICCCNKMDATTP |
| | | | KYSKARYEEIVKEVSSYLKKVGYNPDKVPFVPISGFEGDNMIERSTNLDWYK |
| | | | GPTLLEALDQINEPKRPSDKPLRLPLQDVYKIGGIGTVPVGRVETGVIKPGMVV |
| | | | TFGPTGLTTEVKSVEMHHESLLEALPGDNVGFNVKNVAVKDLKRGFVASNSK |
| | | | DDPAKEAANFTSQVIIMNHPGQIGNGYAPVLDCHTSHIAVKFAELVTKIDRRS |
| | | | GKELEALPKFLKNGDAGIVKMIPTKPMVVETFATYPPLGRFAVRDMRQTVAV |
| | | | GVIKGVEKKDPTGAKVTKAAIKKK |
| DNA | Searched DB | | EMBL-EBI |
| | accession No. | | AAA34306.1 |
| | Full-length sequence | | ATGGGTAAGGAGAAGACTCACATCAACATCGTGGTCATTGGCCATGTCGACTCTGGCAAG |
| | (SEQ ID NO: 23) | | TCGACGACCACTGGCCACCTGATCTACAAGCTTGGAGGCATTGACAAGCGTGTCATCGAG |
| | | | AGGTTCGAGAAGGAAGCCGCTGAGATGAACAAGAGGTCTTTCAAGTACGCGTGGGTGCTT |
| | | | GACAAGCTCAAGGCCGAGCGTGAGAGAGGTATCACCATCGATATTGCTCTCTGGAAGTTC |
| | | | GAGACCACCAAGTACTACTGCACCGTCATTGATGCCCCTGGTCACCGTGACTTCATCAAG |
| | | | AACATGATCACCGGTACCTCCCAGGCTGACTGTGCTGTTCTCATCATCGACTCCACCACT |
| | | | GGTGGTTTTGAGGCTGGTATCTCCAAGGATGGCCAGACACGTGAGCACGCCCTCCTTGCT |
| | | | TTCACTCTTGGAGTGAAGCAGATGATCTGCTGCTGCAACAAGATGGACGCCACCACTCCC |
| | | | AAGTACTCAAAGGCGCGTTATGAAGAAATTGTCAAGGAGGTCTCTTCCTACCTGAAGAAG |
| | | | GTCGGCTACAACCCTGACAAGGTTCCCTTCGTCCCCATCTCTGGGTTTGAGGGTGACAAC |
| | | | ATGATTGAGAGGTCCACCAACCTTGACTGGTACAAGGGCCCAACCCTTCTTGAGGCGCTT |
| | | | GACCAGATCAACGAGCCCAAGAGGCCCTCAGACAAGCCCCTCCGTCTTCCCCTCCAGGAC |
| | | | GTTTACAAGATTGGTGGCATTGGAACTGTGCCTGTTGGCCGTGTTGAGACTGGTGTCATC |
| | | | AAGCCTGGTATGGTTGTCACCTTTGGTCCCACTGGTCTGACAACTGAGGTCAAGTCCGTT |
| | | | GAGATGCACCATGAGTCTCTCCTGGAGGCGCTTCCTGGTGACAACGTTGGCTTCAATGTC |
| | | | AAGAATGTTGCCGTGAAGGATCTGAAGCGTGGTTTTGTTGCATCCAACTCCAAGGATGAC |
| | | | CCTGCCAAGGAGGCAGCCAACTTCACCTCCCAGGTCATCATCATGAACCACCCTGGTCAG |
| | | | ATTGGCAACGGCTACGCCCCAGTGCTGGACTGCCACACCTCGCACATTGCTGTCAAGTTT |
| | | | GCTGAGCTGGTGACCAAGATCGACAGGCGATCTGGTAAGGAGCTGGAGGCCCTGCCCAAG |
| | | | TTCCTCAAGAATGGTGATGCTGGCATAGTGAAGATGATTCCCACCAAGCCCATGGTTGTG |
| | | | GAGACCTTTGCTACTTACCCACCTCTTGGTCGTTTTGCTGTCCGTGACATGAGGCAAACT |
| | | | GTGGCTGTTGGTGTCATCAAGGGTGTGGAGAAGAAGGACCCAACCGGCGCCAAGGTGACC |
| | | | AAGGCTGCCATCAAGAAGAAA |

MW;35kDa

| SPOT No. | | | (14) |
|---|---|---|---|
| protein | Isoelectric | Range | 5-11 |
| | point | Preferably | 5.5-10 |
| | | More | 6-9 |
| | | preferably | |
| | Molecular | Range | 10-80 |
| | weight | Preferably | 20-60 |
| | | More | 30-50 |
| | | preferably | |
| | Searched DB | | Uniprot |
| | Organism species | | Wheat (Triticum aestivum) |
| | accession No. | | A0A0E3UR64 |
| | Protein name | | Alpha-gliadin (Fragment) |
| | Full-length sequence | | MKTFLILALLAIVATTATTAVRVPVPQLQPQNPSQQQPQEQVPLVQQQQFLGQ |
| | (SEQ ID NO: 26) | | QQPFPPQQPYPQPQPFPSQQPYLQLQPFPQPQLPYSQPQPFRPQQPYPQPQPQY |
| | | | SQPQQPISQQQQQQQQQQQQQILQQILQQQLIPCRDVVLQQHNIAHASSQVLQ |
| | | | QSSYQQLQQLCCQQLFQIPEQSRCQAIHNVVHAIILHHHQQQQQQPSSQVSYQ |
| | | | QPQEQYPSGQGSFQSSQQNPQAQGSVQPQQLPQFQEIRNLALQTLPAMCNVYI |
| | | | PPYCSTTIAPFGIFGTN |
| DNA | Searched DB | | EMBL-EBI |
| | accession No. | | AKC91122.1 |
| | Full-length sequence | | ATGAAGACCTTTCTCATCCTTGCCCTCCTTGCTATCGTGGCGACCACCGCCACAACTGCA |
| | (SEQ ID NO: 25) | | GTTAGAGTTCCAGTGCCACAATTGCAGCCACAAAATCCATCTCAGCAACAGCCACAAGAG |
| | | | CAAGTTCCATTGGTACAACAACAACAATTTCTAGGGCAGCAACAACCATTTCCACCACAA |
| | | | CAACCATATCCACAGCCGCAACCATTTCCATCACAACAACCATATCTGCAGCTGCAACCA |
| | | | TTTCCGCAGCCGCAACTACCATATTCGCAGCCACAACCATTTCGACCACAACAACCATAT |
| | | | CCACAACCGCAACCACAGTATTCGCAACCACAACAACCAATTTCACAGCAGCAGCAGCAG |
| | | | CAGCAACAACAACAACAACAACAAATCCTTCAACAAATTCTGCAACAACAACTGATTCCA |
| | | | TGCAGGGATGTTGTCTTGCAACAACACAACATAGCGCATGCAAGCTCACAAGTATTGCAA |
| | | | CAAAGTAGTTACCAACAGTTGCAACAATTATGTTGTCAGCAACTGTTTCAGATCCCCGAG |
| | | | CAGTCGCGGTGCCAAGCCATCCACAATGTTGTTCATGCTATTATTCTGCATCATCATCAA |
| | | | CAACAACAACAACAACCGTCGAGCCAGGTCTCCTACCAGCAGCCTCAGGAACAATATCCA |
| | | | TCAGGCCAGGGCTCCTTCCAGTCATCTCAGCAAAACCCACAGGCCCAGGGCTCTGTCCAG |
| | | | CCTCAACAACTGCCCCAGTTCCAGGAAATAAGGAACTTAGCGCTGCAGACGCTGCCAGCA |
| | | | ATGTGCAATGTCTACATCCCTCCATATTGCTCGACCACCATTGCGCCATTTGGCATCTTC |
| | | | GGTACCAAC |

MW;40kDa

| SPO SPOT No. | | | (15) (16) |
|---|---|---|---|
| protein | Isoelectric | Range | 5-11 |
| protein | point | Preferably | 5.5-10 |
| | | More | 6-9 |
| | | preferably | |
| | Molecular | Range | 10-80 |
| | weight | Preferably | 20-60 |
| | | More | 30-50 |
| | | preferably | |
| | Searched DB | | Uniprot |
| | Organism species | | Wheat (Triticum aestivum) |
| | accession No. | | I7KM78 |
| | Protein name | | Gamma-gliadin |
| | Full-length sequence | | MKIFMVFALLVASTTITTATAQLDPRIHDQERPQQSFLQQQPLIQQQPYPPQEP |
| | (SEQ ID NO: 28) | | QQPLFPQKEPQQPFPLQQPQYQQQQPYPQQPLPQEQLPQQHLFPQQPPQQQFP |
| | | | QQMPLPHQQQTFPQQQQQQQQQEQLPQQLPQFPQQQPFSQYQQPLTQQPYSQ |
| | | | EQPLPQQQPSVEEKQQLNLCKEELLQQCNPEEKLSLLQSVIPFLRPKTSQQNSC |
| | | | QLKRLQCCRQLAHISEPSRCPAIHNIVHAIVMQQQHVDRGEGQPQPQQLGQE |
| | | | MPMQPQHQLGQHSILPQQLAQYKLVRLLVIQTLPMLCNVHVPSDCYTITAPFG |
| | | | SMTAYNGGQ |
| DNA | Searched DB | | EMBL-EBI |
| DNA | accession No. | | CCH80658.1 |
| | Full-length sequence | | ATGAAGATCTTCATGGTCTTTGCCCTCCTCGTTGCATCAACGACCATCACCACCGCGACC |
| | (SEQ ID NO: 27) | | GCACAGCTCGACCCTCGCATCCATGACCAAGAAAGGCCACAACAATCGTTTCTGCAACAG |
| | | | CAACCACTTATCCAGCAACAACCATACCCGCCTCAAGAGCCACAACAACCACTATTCCCG |
| | | | CAAAAAGAGCCACAACAACCATTTCCGCTGCAGCAGCCACAATACCAGCAACAACAACCG |
| | | | TATCCACAACAACCACTTCCCCAAGAACAACTTCCCCAGCAACATTTATTTCCGCAGCAG |
| | | | CCGCCACAACAACAATTTCCACAACAGATGCCACTTCCGCATCAACAACAAACATTCCCG |
| | | | CAACAACAACAACAACAACAACAACAAGAACAACTCCCACAACAACTCCCACAATTCCCG |
| | | | CAACAACAACCATTTTCCCAATATCAACAACCATTAACACAACAACCATACTCGCAAGAG |
| | | | CAACCATTGCCACAACAACAACCTTCTGTAGAGGAAAAACAACAATTGAACTTGTGCAAG |
| | | | GAGTTCCTCCTGCAGCAGTGTAACCCAGAGGAGAAACTGTCGTTACTCCAGTCAGTGATC |
| | | | CCGTTCCTCCGACCAAAGACCTCGCAACAGAACAGCTGCCAGTTGAAGCGACTACAATGT |
| | | | TGTCGACAACTTGCACATATCAGTGAACCGTCCCGATGCCCGGCCATCCACAACATTGTG |
| | | | CATGCCATCGTCATGCAACAACAACATGTGGATAGAGGTTTCGGCCAGCCTCAACCACAA |
| | | | CAGTTGGGCCAGGAAATGCCCATGCAGCCTCAACATCAATTGGGCCAGCACTCTATCCTA |
| | | | CCTCAACAACTAGCCCAGTACAAGTTGGTTAGGTTACTTGTGATTCAGACCCTTCCTATG |
| | | | TTATGCAACGTGCATGTCCCGTCTGATTGCTACACCATTACTGCACCATTTGGTAGCATG |
| | | | ACTGCCTACAATGGTGGACAA |

[0107] Spots 11 and 12 or spots 15 and 16 are derived from the same protein, and a total of 14 types of proteins from (1) to (14) were identified as novel antigens derived from wheat.

[0108] The antigen in spot 1 in the present invention is not limited and can be any of the proteins as defined below in (1-a) to (1-f).
[0109] (1-a) a protein comprising the amino acid sequence of SEQ ID NO: 2;
[0110] (1-b) a protein comprising an amino acid sequence with deletion, substitution, insertion or addition of one or several amino acids in SEQ ID NO: 2;
[0111] (1-c) a protein comprising an amino acid sequence having at least 70% identity to the amino acid sequence of SEQ ID NO: 2;
[0112] (1-d) a protein comprising an amino acid sequence encoded by a nucleotide sequence with deletion, substitution, insertion or addition of one or several nucleotides in SEQ ID NO: 1;
[0113] (1-e) a protein comprising an amino acid sequence encoded by a nucleotide sequence having at least 70% identity to the nucleotide sequence of SEQ ID NO: 1; and (1-f) a protein comprising an amino acid sequence encoded by a nucleic acid that hybridizes under stringent conditions with a nucleic acid having a nucleotide sequence complementary to the nucleotide sequence of SEQ ID NO: 1.
[0114] (2-a) a protein comprising the amino acid sequence of SEQ ID NO: 4;
[0115] (2-b) a protein comprising an amino acid sequence with deletion, substitution, insertion or addition of one or several amino acids in SEQ ID NO: 4;
[0116] (2-c) a protein comprising an amino acid sequence having at least 70% identity to the amino acid sequence of SEQ ID NO: 4;
[0117] (2-d) a protein comprising an amino acid sequence encoded by a nucleotide sequence with deletion, substitution, insertion or addition of one or several nucleotides in SEQ ID NO: 3;
[0118] (2-e) a protein comprising an amino acid sequence encoded by a nucleotide sequence having at least 70% identity to the nucleotide sequence of SEQ ID NO: 3; and
[0119] (2-f) a protein comprising an amino acid sequence encoded by a nucleic acid that hybridizes under stringent conditions with a nucleic acid having a nucleotide sequence complementary to the nucleotide sequence of SEQ ID NO: 3.
[0120] (3-a) a protein comprising the amino acid sequence of SEQ ID NO: 6;
[0121] (3-b) a protein comprising an amino acid sequence with deletion, substitution, insertion or addition of one or several amino acids in SEQ ID NO: 6;
[0122] (3-c) a protein comprising an amino acid sequence having at least 70% identity to the amino acid sequence of SEQ ID NO: 6;
[0123] (3-d) a protein comprising an amino acid sequence encoded by a nucleotide sequence with deletion, substitution, insertion or addition of one or several nucleotides in SEQ ID NO: 5;
[0124] (3-e) a protein comprising an amino acid sequence encoded by a nucleotide sequence having at least 70% identity to the nucleotide sequence of SEQ ID NO: 5; and
[0125] (3-f) a protein comprising an amino acid sequence encoded by a nucleic acid that hybridizes under stringent conditions with a nucleic acid having a nucleotide sequence complementary to the nucleotide sequence of SEQ ID NO: 5.
[0126] (4-a) a protein comprising the amino acid sequence of SEQ ID NO: 8;
[0127] (4-b) a protein comprising an amino acid sequence with deletion, substitution, insertion or addition of one or several amino acids in SEQ ID NO: 8;
[0128] (4-c) a protein comprising an amino acid sequence having at least 70% identity to the amino acid sequence of SEQ ID NO: 8;
[0129] (4-d) a protein comprising an amino acid sequence encoded by a nucleotide sequence with deletion, substitution, insertion or addition of one or several nucleotides in SEQ ID NO: 9;
[0130] (4-e) a protein comprising an amino acid sequence encoded by a nucleotide sequence having at least 70% identity to the nucleotide sequence of SEQ ID NO: 9; and
[0131] (4-f) a protein comprising an amino acid sequence encoded by a nucleic acid that hybridizes under stringent conditions with a nucleic acid having a nucleotide sequence complementary to the nucleotide sequence of SEQ ID NO: 9.
[0132] (5-a) a protein comprising the amino acid sequence of SEQ ID NO: 10;
[0133] (5-b) a protein comprising an amino acid sequence with deletion, substitution, insertion or addition of one or several amino acids in SEQ ID NO: 10;
[0134] (5-c) a protein comprising an amino acid sequence having at least 70% identity to the amino acid sequence of SEQ ID NO: 10;
[0135] (5-d) a protein comprising an amino acid sequence encoded by a nucleotide sequence with deletion, substitution, insertion or addition of one or several nucleotides in SEQ ID NO: 9;
[0136] (5-e) a protein comprising an amino acid sequence encoded by a nucleotide sequence having at least 70% identity to the nucleotide sequence of SEQ ID NO: 9; and
[0137] (5-f) a protein comprising an amino acid sequence encoded by a nucleic acid that hybridizes under stringent conditions with a nucleic acid having a nucleotide sequence complementary to the nucleotide sequence of SEQ ID NO: 9.
[0138] (6-a) a protein comprising the amino acid sequence of SEQ ID NO: 12;
[0139] (6-b) a protein comprising an amino acid sequence with deletion, substitution, insertion or addition of one or several amino acids in SEQ ID NO: 12;
[0140] (6-c) a protein comprising an amino acid sequence having at least 70% identity to the amino acid sequence of SEQ ID NO: 12;
[0141] (6-d) a protein comprising an amino acid sequence encoded by a nucleotide sequence with deletion, substitution, insertion or addition of one or several nucleotides in SEQ ID NO: 11;
[0142] (6-e) a protein comprising an amino acid sequence encoded by a nucleotide sequence having at least 70% identity to the nucleotide sequence of SEQ ID NO: 11; and
[0143] (6-f) a protein comprising an amino acid sequence encoded by a nucleic acid that hybridizes under stringent conditions with a nucleic acid having a nucleotide sequence complementary to the nucleotide sequence of SEQ ID NO: 11.
[0144] (7-a) a protein comprising the amino acid sequence of SEQ ID NO: 14;
[0145] (7-b) a protein comprising an amino acid sequence with deletion, substitution, insertion or addition of one or several amino acids in SEQ ID NO: 14;
[0146] (7-c) a protein comprising an amino acid sequence having at least 70% identity to the amino acid sequence of SEQ ID NO: 14;
[0147] (7-d) a protein comprising an amino acid sequence encoded by a nucleotide sequence with deletion, substitution, insertion or addition of one or several nucleotides in SEQ ID NO: 13;
[0148] (7-e) a protein comprising an amino acid sequence encoded by a nucleotide sequence having at least 70% identity to the nucleotide sequence of SEQ ID NO: 13; and
[0149] (7-f) a protein comprising an amino acid sequence encoded by a nucleic acid that hybridizes under stringent conditions with a nucleic acid having a nucleotide sequence complementary to the nucleotide sequence of SEQ ID NO: 13.
[0150] (8-a) a protein comprising the amino acid sequence of SEQ ID NO: 16;
[0151] (8-b) a protein comprising an amino acid sequence with deletion, substitution, insertion or addition of one or several amino acids in SEQ ID NO: 16;
[0152] (8-c) a protein comprising an amino acid sequence having at least 70% identity to the amino acid sequence of SEQ ID NO: 16;
[0153] (8-d) a protein comprising an amino acid sequence encoded by a nucleotide sequence with deletion, substitution, insertion or addition of one or several nucleotides in SEQ ID NO: 15;
[0154] (8-e) a protein comprising an amino acid sequence encoded by a nucleotide sequence having at least 70% identity to the nucleotide sequence of SEQ ID NO: 15; and
[0155] (8-f) a protein comprising an amino acid sequence encoded by a nucleic acid that hybridizes under stringent conditions with a nucleic acid having a nucleotide sequence complementary to the nucleotide sequence of SEQ ID NO: 15.
[0156] (9-a) a protein comprising the amino acid sequence of SEQ ID NO: 18;
[0157] (9-b) a protein comprising an amino acid sequence with deletion, substitution, insertion or addition of one or several amino acids in SEQ ID NO: 18;
[0158] (9-c) a protein comprising an amino acid sequence having at least 70% identity to the amino acid sequence of SEQ ID NO: 18;
[0159] (9-d) a protein comprising an amino acid sequence encoded by a nucleotide sequence with deletion, substitution, insertion or addition of one or several nucleotides in SEQ ID NO: 17;
[0160] (9-e) a protein comprising an amino acid sequence encoded by a nucleotide sequence having at least 70% identity to the nucleotide sequence of SEQ ID NO: 17; and
[0161] (9-f) a protein comprising an amino acid sequence encoded by a nucleic acid that hybridizes under stringent conditions with a nucleic acid having a nucleotide sequence complementary to the nucleotide sequence of SEQ ID NO: 17.
[0162] (10-a) a protein comprising the amino acid sequence of SEQ ID NO: 20;
[0163] (10-b) a protein comprising an amino acid sequence with deletion, substitution, insertion or addition of one or several amino acids in SEQ ID NO: 20;
[0164] (10-c) a protein comprising an amino acid sequence having at least 70% identity to the amino acid sequence of SEQ ID NO: 20;
[0165] (10-d) a protein comprising an amino acid sequence encoded by a nucleotide sequence with deletion, substitution, insertion or addition of one or several nucleotides in SEQ ID NO: 19;
[0166] (10-e) a protein comprising an amino acid sequence encoded by a nucleotide sequence having at least 70% identity to the nucleotide sequence of SEQ ID NO: 19; and
[0167] (10-f) a protein comprising an amino acid sequence encoded by a nucleic acid that hybridizes under stringent conditions with a nucleic acid having a nucleotide sequence complementary to the nucleotide sequence of SEQ ID NO: 19.
[0168] (11-a) a protein comprising the amino acid sequence of SEQ ID NO: 22;
[0169] (11-b) a protein comprising an amino acid sequence with deletion, substitution, insertion or addition of one or several amino acids in SEQ ID NO: 22;
[0170] (11-c) a protein comprising an amino acid sequence having at least 70% identity to the amino acid sequence of SEQ ID NO: 22;
[0171] (11-d) a protein comprising an amino acid sequence encoded by a nucleotide sequence with deletion, substitution, insertion or addition of one or several nucleotides in SEQ ID NO: 21;
[0172] (11-e) a protein comprising an amino acid sequence encoded by a nucleotide sequence having at least 70% identity to the nucleotide sequence of SEQ ID NO: 21; and
[0173] (11-f) a protein comprising an amino acid sequence encoded by a nucleic acid that hybridizes under stringent conditions with a nucleic acid having a nucleotide sequence complementary to the nucleotide sequence of SEQ ID NO: 21.
[0174] (12-a) a protein comprising the amino acid sequence of SEQ ID NO: 24;
[0175] (12-b) a protein comprising an amino acid sequence with deletion, substitution, insertion or addition of one or several amino acids in SEQ ID NO: 24;
[0176] (12-c) a protein comprising an amino acid sequence having at least 70% identity to the amino acid sequence of SEQ ID NO: 24;
[0177] (12-d) a protein comprising an amino acid sequence encoded by a nucleotide sequence with deletion, substitution, insertion or addition of one or several nucleotides in SEQ ID NO: 23;
[0178] (12-e) a protein comprising an amino acid sequence encoded by a nucleotide sequence having at least 70% identity to the nucleotide sequence of SEQ ID NO: 23; and
[0179] (12-f) a protein comprising an amino acid sequence encoded by a nucleic acid that hybridizes under stringent conditions with a nucleic acid having a nucleotide sequence complementary to the nucleotide sequence of SEQ ID NO: 23.
[0180] (13-a) a protein comprising the amino acid sequence of SEQ ID NO: 26;
[0181] (13-b) a protein comprising an amino acid sequence with deletion, substitution, insertion or addition of one or several amino acids in SEQ ID NO: 26;
[0182] (13-c) a protein comprising an amino acid sequence having at least 70% identity to the amino acid sequence of SEQ ID NO: 26;
[0183] (13-d) a protein comprising an amino acid sequence encoded by a nucleotide sequence with deletion, substitution, insertion or addition of one or several nucleotides in SEQ ID NO: 25;
[0184] (13-e) a protein comprising an amino acid sequence encoded by a nucleotide sequence having at least 70% identity to the nucleotide sequence of SEQ ID NO: 25; and
[0185] (13-f) a protein comprising an amino acid sequence encoded by a nucleic acid that hybridizes under stringent conditions with a nucleic acid having a nucleotide sequence complementary to the nucleotide sequence of SEQ ID NO: 25.
[0186] (14-a) a protein comprising the amino acid sequence of SEQ ID NO: 28;
[0187] (14-b) a protein comprising an amino acid sequence with deletion, substitution, insertion or addition of one or several amino acids in SEQ ID NO: 28;
[0188] (14-c) a protein comprising an amino acid sequence having at least 70% identity to the amino acid sequence of SEQ ID NO: 28;
[0189] (14-d) a protein comprising an amino acid sequence encoded by a nucleotide sequence with deletion, substitution, insertion or addition of one or several nucleotides in SEQ ID NO: 27;
[0190] (14-e) a protein comprising an amino acid sequence encoded by a nucleotide sequence having at least 70% identity to the nucleotide sequence of SEQ ID NO: 27; and
[0191] (14-f) a protein comprising an amino acid sequence encoded by a nucleic acid that hybridizes under stringent conditions with a nucleic acid having a nucleotide sequence complementary to the nucleotide sequence of SEQ ID NO: 27.

[0192] The proteins that are the aforementioned antigens (1) to (14) and polypeptides (E1) to (E50) mentioned later include those proteins or polypeptides in a form whose amino acid residues are modified by phosphorylation, sugar chain modification, aminoacylation, ring-opening, deamination or the like.

[0193] The proteins that are the aforementioned antigens (1) to (14) and polypeptides (E1) to (E50) mentioned later are preferably antigens of an allergy.

[0194] By stating herein “deletion, substitution, insertion or addition of one or several amino acids” in relation to amino acid sequence, it is meant that in an amino acid sequence of interest, one or several amino acids are deleted, one or several amino acids are substituted by any other amino acids, any other amino acids are inserted, and/or any other amino acids are added. “Several amino acids” are not limited and mean at least 200, at least 100, at least 50, at least 30, at least 20, at least 15, at least 12, at least 10, at least 8, at least 6, at least 4 or at least 3 amino acids. Alternatively, several amino acids mean 30%, preferably 25%, 20%, 15%, 10%, 5%, 3%, 2% or 1%, of amino acids with respect to the total length of the amino acid sequence.

[0195] Among the aforementioned modifications, substitution is preferably conservative substitution. The “conservative substitution” refers to the substitution of a certain amino acid residue by a different amino acid residue having similar physicochemical characteristics, and can be any type of substitution as long as it does not substantially change the characteristics of the structure of the original sequence for example, any type of substitution is acceptable as long as any substituted amino acids do not disrupt the helical structure of the original sequence or other secondary structures that characterize the original sequence. The following gives examples of separate groups of amino acid residues that are conservatively substitutable with each other, but substitutable amino acid residues are not limited to the examples given below.
[0196] Group A: leucine, isoleucine, valine, alanine, methionine, glycine, cysteine, proline
[0197] Group B: aspartic acid, glutamic acid
[0198] Group C: asparagine, glutamine
[0199] Group D: lysine, arginine
[0200] Group E: serine, threonine
[0201] Group F: phenylalanine, tyrosine, tryptophan, histidine

[0202] In the case of non-conservative substitution, one member belonging to one of the aforementioned groups can be replaced with a member belong to any other group. For example, in order to eliminate the possibility of unwanted sugar-chain modification, amino acids of group B, D or E as listed above may be substituted by those of any other group. Also, cysteines may be deleted or substituted by any other amino acids to prevent them from being folded into a protein in its tertiary structure. Also, in order to maintain the balance between hydrophilicity and hydrophobicity or to increase hydrophilicity for the purpose of facilitating synthesis, any amino acids may be substituted in consideration of the hydropathy scales of amino acids, which are a measure of the hydrophilic and hydrophobic properties of amino acids (J. Kyte and R. Doolittle, J. Mol. Biol., Vol. 157, p. 105-132, 1982).

[0203] In another embodiment, substitution of the original amino acid by an amino acid with less steric hindrance, for example, substitution of group F by group A, B, C, D or E; or substitution of an amino acid having an electric charge by an amino acid having no electric charge, for example, substitution of group B by group C, may be performed. This may improve binding activity against IgE antibodies.

[0204] As referred to herein, the percent identity between two amino acid sequences can be determined by visual inspection and mathematical calculation. Alternatively, the percent identity can be determined using a computer program. Examples of such computer programs include BLAST and ClustalW. In particular, various conditions (parameters) for identity searches with the BLAST program are described in Altschul, et al. (Nucl. Acids. Res., 25, p. 3389-3402, 1997), and are publicly available on the websites of the NCBI and DNA Data Bank of Japan (DDBJ) (Altschul, et al., BLAST Manial, Altschul, et al., NCB/NLM/NIH Bethesda, MD 20894). Also, the percent identity can be determined using a genetic information processing software program, such as GENETYX Ver. 7 (Genetyx Corporation), DINASIS Pro (Hitachi Software Engineering Co., Ltd.), or Vector NTI (Infomax Inc.).

[0205] By stating herein “deletion, substitution, insertion or addition of one or several nucleotides” in relation to nucleotide sequence, it is meant that in a nucleotide sequence of interest, one or several nucleotides are deleted, one or several nucleotides are substituted by any other nucleotides, any other nucleotides are inserted, and/or any other nucleotides are added. “Several nucleotides” are not limited and mean at least 600, at least 300, at least 150, at least 100, at least 50, at least 30, at least 20, at least 15, at least 12, at least 10, at least 8, at least 6, at least 4 or at least 3 nucleotide acids. Alternatively, several nucleotides mean 30%, preferably 25%, 20%, 15%, 10%, 5%, 3%, 2% or 1%, of nucleotides with respect to the total length of the nucleotide sequence. It is preferable that such a nucleotide deletion, substitution, insertion or addition should not give rise to a frame shift in an amino acid coding sequence.

[0206] As referred to herein, the percent identity between two nucleotide sequences can be determined by visual inspection and mathematical calculation. Alternatively, the percent identity can be determined using a computer program. Examples of such sequence comparison computer programs include the BLASTN program, version 2.2.7, available on the website of the National Library of Medicine: blast dot ncbi dot nlm dot nih dot gov slash Blast dot cgi (Altschul, et al. (1990) J. Mol. Biol., 215:403-10), or the WU-BLAST 2.0 algorithm. Standard default parameter settings for WU-BLAST 2.0 are found and available on the following website: blast dot wustl dot edu.

[0207] As referred to herein, “under stringent conditions” means that hybridization takes place under moderately or highly stringent conditions. To be specific, the moderately stringent conditions can be easily determined by those having ordinary skill in the art on the basis of, for example, the length of DNA. Basic conditions are described in Sambrook, et al., Molecular Cloning: A Laboratory Manual, 3rd ed., ch. 6-7, Cold Spring Harbor Laboratory Press, 2001. The moderately stringent conditions include hybridization under the conditions of preferably 1×SSC to 6×SSC at 42° C. to 55° C., more preferably 1×SSC to 3×SSC at 45° C. to 50° C., most preferably 2×SSC at 50° C. In the case of using a hybridization solution containing, for example, about 50% formamide, a temperature around 5 to 15° C. lower than the foregoing should be adopted. Washing is also carried out under the conditions of 0.5×SSC to 6×SSC at 40° C. to 60° C. In the process of hybridization and washing, generally 0.05% to 0.2% SDS, preferably about 0.1% SDS, may be added. Likewise, the highly stringent conditions can be easily determined by those having ordinary skill in the art on the basis of, for example, the length of DNA. Generally, the highly stringent (high stringent) conditions include hybridization and/or washing at a higher temperature and/or a lower salt concentration than those adopted under the moderately stringent conditions. For example, hybridization is carried out under the conditions of 0.1×SSC to 2×SSC at 55° C. to 65° C., more preferably 0.1×SSC to 1×SSC at 60° C. to 65° C., most preferably 0.2×SSC at 63° C. Washing is carried out under the conditions of 0.2×SSC to 2×SSC at 50° C. to 68° C., more preferably 0.2×SSC at 60 to 65° C.

[0208] Variants corresponding to the proteins as defined above in (b) to (f) of (1) to (14) are not limited and preferably comprise an amino acid sequence of an epitope (variant) mentioned later. The amino acid sequence of the epitope contained is not limited to one sequence and preferably includes all sequences of epitopes derived from each protein. For example, epitopes derived from the protein as defined in (1) are (E9), (E31), (E11), (E36) and (E43). Thus, the variants as defined in (1-b) to (1-f) preferably comprise one or more of the amino acid sequences (including their variants) of the epitopes (E9), (E31), (E11), (E36) and (E43).

[0209] Antigens may be obtained by separating and purifying them from wheat using a combination of protein purification methods well known to those skilled in the art. Also, antigens may be obtained by expressing them as recombinant proteins using a genetic recombination technique well known to those skilled in the art and by separating and purifying them using protein purification methods well known to those skilled in the art.

[0210] Exemplary protein purification methods include: solubility-based purification methods such as salt precipitation and solvent precipitation; purification methods based on molecular weight difference, such as dialysis, ultrafiltration, gel filtration and SDS-PAGE; charge-based purification methods such as ion exchange chromatography and hydroxylapatite chromatography; specific affinity-based purification methods such as affinity chromatography; purification methods based on hydrophobicity difference, such as reverse-phase high-performance liquid chromatography; and purification methods based on isoelectric point difference, such as isoelectric focusing.

[0211] Preparation of a protein by a genetic recombination technique is carried out by preparing an expression vector comprising an antigen-encoding nucleic acid, introducing the expression vector into appropriate host cells by gene transfer or genetic transformation, culturing the host cells under suitable conditions for expression of a recombinant protein, and recovering the recombinant protein expressed in the host cells.

[0212] The “vector” refers to a nucleic acid that can be used to introduce a nucleic acid attached thereto into host cells. The “expression vector” is a vector that can induce the expression of a protein encoded by a nucleic acid introduced therethrough. Exemplary vectors include plasmid vectors and viral vectors. Those skilled in the art can select an appropriate expression vector for the expression of a recombinant protein depending on the type of host cells to be used.

[0213] The “host cells” refers to cells that undergo gene transfer or genetic transformation by a vector. The host cells can be appropriately selected by those skilled in the art depending on the type of the vector to be used. The host cells can be derived from prokaryotes such as E. coli. When prokaryotic cells like E coli. are used as host cells, the antigen of the present invention may be designed to contain an N-terminal methionine residue in order to facilitate the expression of a recombinant protein in the prokaryotic cells. The N-terminal methionine can be cleaved from the recombinant protein after expression. Also, the host cells may be cells derived from eukaryotes, such as single-cell eukaryotes like yeast, plant cells and animal cells (e.g., human cells, monkey cells, hamster cells, rat cells, murine cells or insect cells) or silkworm.

[0214] Gene transfer or genetic transformation of an expression vector into host cells can be carried out as appropriate by following a technique known to those skilled in the art. Those skilled in the art can make possible the expression of a recombinant protein by selecting suitable conditions for the expression of the recombinant protein as appropriate depending on the type of host cells and culturing the host cells under the selected conditions. Then, those skilled in the art can homogenize the host cells having the expressed recombinant protein, and separate and purify an antigen expressed as the recombinant protein from the resulting homogenate by using an appropriate combination of such protein purification methods as mentioned above. The aforementioned expression vector or synthesized double-stranded DNA, or mRNA transcribed therefrom is introduced into a cell-free protein synthesis system for expression, and the expressed protein can be separated and purified to prepare an antigen.

[0215] Preferably, the antigen of the present invention specifically binds to an IgE antibody from an allergic patient.

### Diagnosis Kit and Method (1)

[0216] The present invention provides a method for providing an indicator for diagnosing an allergy in a subject, the method comprising the steps of:
[0217] (i) contacting a sample obtained from the subject with an antigen, wherein the sample is a solution comprising an IgE antibody;
[0218] (ii) detecting binding between an IgE antibody present in the sample from the subject and the antigen; and
[0219] (iii) when the binding between the IgE antibody in the subject and the antigen is detected, an indicator of the fact that the subject is allergic is provided;
[0220] wherein the antigen is at least one of proteins as defined above in any of (1) to (14).

[0221] In one embedment, the “allergy” is not limited and is an allergy to grain, preferably an allergy to grain of the family Poaceae or an allergy to wheat.

[0222] As referred to herein, the “diagnosis” includes mere “detection” having a potential, in addition to (definitive) diagnosis that is generally made by a physician. As referred to herein, in one embodiment, the “diagnosis” and the “detection” are in vivo, in vitro or ex vivo “diagnosis” and “detection”. In vitro “diagnosis” and “detection” are preferred.

[0223] The sample obtained from a subject is a solution containing an IgE antibody, as collected from the subject. Examples of such solutions include blood, saliva, sputum, snivel, urine, sweat, and tear. The sample obtained from the subject may be subjected to pretreatment for increasing the concentration of an IgE antibody in the sample before being contacted with an antigen. The pretreatment of a sample may involve, for example, collection of the serum or the plasma from the blood. Furthermore, a Fab moiety that is an antigen-binding moiety may be purified. In a particularly preferred embodiment, the step (i) mentioned above is carried out by contacting an IgE antibody present in the serum obtained from a subject with an antigen.

[0224] The IgE antibody may be the IgE antibody itself or may be mast cells or the like bound to IgE antibodies.

[0225] Detection of contact and binding between the sample obtained from a subject and an antigen can be carried out by using a known method. Examples of such methods that can be used include detection by ELISA (Enzyme-Linked Immunosorbent Assay), sandwich immunoassay, immunoblotting technique, immunoprecipitation, or immunochromatography. These are all techniques for detecting binding between an antigen and an IgE antibody from a subject by contacting and binding the IgE antibody from a subject with the antigen, allowing an enzymatically labelled secondary antibody to act on the IgE antibody specifically bound to the antigen, and adding an enzyme substrate (generally, chromogenic or luminescent reagent) to detect an enzymatic reaction product. Also, a method for detecting a fluorescently labeled secondary antibody can be used. Alternatively, detection by a measurement method capable of evaluating binding between an antigen and an IgE antibody, such as surface plasmon resonance (SPR), can also be used. A plurality of antigen-specific IgE antibodies may be mixed.

[0226] The antigen may be provided as an isolated antigen in a state immobilized on a carrier. In this case, the steps (i) and (ii) mentioned above can be carried out using ELISA, sandwich immunoassay, immunochromatography, surface plasmon resonance, or the like. Also, the step (i) mentioned above can be carried out by contacting the sample obtained from a subject with an antigen-immobilized surface. The isolated antigen may be obtained by separating and purifying it from a subject (raw materials, processed products, etc.) using a combination of protein purification methods well known to those skilled in the art, or by preparing it using a genetic recombination technique. Alternatively, an antibody may be attached to a carrier.

[0227] The antigen may be in a state unimmobilized on a carrier. In this case, flow cytometry or the like can be used in the aforementioned steps (i) and (ii), and the presence of the antigen bound to the antibody can be confirmed with laser beam. Examples include a basophil activation test (BAT). Another example includes a histamine release test (HRT) which examines whether histamine is released by further contacting an antigen with blood cells in a sample.

[0228] The antigen may be detected by an immunoblotting technique after transfer from a state separated by two-dimensional electrophoresis. The two-dimensional electrophoresis is a technique for separating a protein sample by performing isoelectric focusing in the first dimension and performing SDS-PAGE in the second dimension. The conditions for two-dimensional electrophoresis are not particularly limited as long as the conditions permit the separation of the antigen of the present invention. For example, the conditions for two-dimensional electrophoresis as described above in the subsection titled “Identification of antigens” can be adopted. Also, the electrophoresis conditions may be defined by reference to the descriptions in Patent Literatures 1 to 4 mentioned above. For example, two-dimensional electrophoresis can be carried out under the conditions that satisfy at least one selected from the group consisting of the following requirements:
[0229] (A) the isoelectric focusing gels used in the first dimension should have a gel-strip length of 5 to 10 cm and a gel pH range of 3 to 10, and the pH gradient of the gels in the direction of electrophoresis should be as follows: where the gel-strip length up to pH 5 is taken as “a”, that length from pH 5 to 7 as “b”, and that length above pH 7 as “c”, the relations “a<b” and “b>c” are satisfied;
[0230] (B) in the case of (A), when the total gel-strip length is taken as 1, “a” should be in the range of 0.15 to 0.3, “b” should be in the range of 0.4 to 0.7, and “c” should be in the range of 0.15 to 0.3;
[0231] (C) in the first dimensional isoelectric focusing, a constant voltage step should be performed by applying a constant voltage ranging from 100 V to 600 V per gel strip containing a sample, and after the electrophoresis variation width during electrophoresis for 30 minutes falls within the range of 5 uA, a voltage-increasing step should be started at which the voltage is increased from the aforementioned constant voltage;
[0232] (D) in the case of (C), the final voltage at the voltage-increasing step should be in the range of 3000 V to 6000 V;
[0233] (E) the isoelectric focusing gels used in the first dimension should have a longitudinal gel-strip length of 5 to 10 cm, and the electrophoresis gels used in the second dimension should have a gel concentration at the distal end in the direction of electrophoresis, which is in the range of 3 to 6%; and
[0234] (F) in the case of (E), the electrophoresis gels used in the second dimension should have a gel concentration at the proximal end in the direction of electrophoresis, which is set to a higher value than that at the distal end in the direction of electrophoresis.

[0235] The aforementioned antigens (1) to (14) are antigens that specifically bind to IgE antibodies from allergic patients (e.g., patients with allergy to wheat). Therefore, when binding between an IgE antibody from a subject and the antigen is detected, an indicator of the fact that the subject is allergic is provided.

[0236] The present invention further provides a kit for diagnosing an allergy, comprising at least one of the aforementioned antigens (1) to (14). The diagnosis kit of this invention may be used in the aforementioned method for providing an indicator for diagnosing an allergy or in a diagnosis method as described later. The diagnosis kit of this invention may comprise not only the at least one of the aforementioned antigens (1) to (14), but also an anti-IgE antibody labeled with an enzyme and a chromogenic or luminescent substrate serving as a substrate for the enzyme. Also, a fluorescent-labeled anti-IgE antibody may be used. In the diagnosis kit of this invention, the antigen may be provided in a state immobilized on a carrier. The diagnosis kit of this invention may also be provided together with instructions on the procedure for diagnosis or a package containing said instructions.

[0237] In another embodiment, the aforementioned diagnosis kit comprises a companion diagnostic agent for an allergy. The companion diagnostic agent is used for identifying patients expected to respond to pharmaceutical products or identifying patients having the risk of severe adverse reactions to pharmaceutical products, or for studying the reactivity of pharmaceutical products in order to optimize treatment using the pharmaceutical products. Here, the optimization of treatment includes, for example, determination of dosage and administration, judgment regarding discontinuation of administration, and confirmation of an allergen component that is used to cause immunological tolerance.

[0238] The present invention further provides a composition for diagnosing an allergy, comprising at least one of the aforementioned antigens (1) to (14). The diagnosis composition of this invention can be used in a diagnosis method as described below. The diagnosis composition of this invention may further comprise a pharmaceutically acceptable carrier and/or additives commonly used with the antigen of this invention depending on the need.

[0239] In one embodiment, the present invention provides a method for diagnosing an allergy in a subject, the method comprising:
[0240] (i) contacting a sample obtained from the subject with an antigen;
[0241] (ii) detecting binding between an IgE antibody present in the sample from the subject and the antigen; and
[0242] (iii) when the binding between the IgE antibody in the subject and the antigen is detected, diagnosing the subject as being allergic;
[0243] wherein the antigen is at least one of proteins as defined above in any of (1) to (14). In this method, the steps (i) and (ii) are performed as described above regarding the corresponding steps of the method for providing an indicator for diagnosing an allergy.

[0244] In another embodiment, the present invention provides a method for diagnosing an allergy in a subject, the method comprising administering to the subject at least one of the aforementioned antigens (1) to (14). This method may be performed in the form of a skin test characterized by applying the antigen onto the skin. Examples of the skin test include various forms of tests, such as: a prick test in which a diagnosis composition is applied onto the skin and then a tiny prick to such an extent as not to provoke bleeding is made in the skin to allow an antigen to penetrate the skin, thereby observing a skin reaction; a scratch test in which a diagnosis composition is applied onto the skin and then the skin is lightly scratched to observe a reaction; a patch test in which a diagnosis composition in the form of cream, ointment, etc. is applied onto the skin to observe a reaction; and an intracutaneous test in which an antigen is administered intracutaneously to observe a reaction. If a skin reaction such as swelling occurs in a skin portion to which the antigen has been applied, the subject of interest is diagnosed as having an allergy. The amount of the antigen to be applied to the skin in such tests can be, for example, not more than 100 μg per dose.

[0245] In the process of allergy diagnosis, a load test aiming to identify an antigen is often adopted. At least one of the aforementioned antigens (1) to (14) can be used as an active ingredient for a load test to diagnose an allergy. Here, the antigen protein to be used in the load test may be a protein that has been expressed and purified and may be a protein that has been expressed in raw materials or processed products, such as rice-based vaccine expressing pollen allergens which are obtained by transforming rice with a gene of a cedar pollen antigen and expressing the antigen protein in the rice.

[0246] In one embodiment, the diagnosis composition or the diagnosis kit described above may be used for a prick test, a scratch test, a patch test, an intracutaneous test or the like.

[0247] In yet another embodiment, the present invention provides at least one of the aforementioned antigens (1) to (14), intended for use in the diagnosis of an allergy. This also includes the provision of at least one of the aforementioned antigens (1) to (14) mixed with a known antigen.

[0248] In still another embodiment, the present invention provides use of at least one of the aforementioned antigens (1) to (14) for the production of a composition for diagnosing an allergy.

### Composition and Treatment Method (1)

[0249] The present invention provides a composition comprising at least one of the aforementioned antigens (1) to (14).

[0250] In one embodiment, the composition of the present invention is a pharmaceutical composition. In one embodiment, the composition of the present invention is a quasi-pharmaceutical composition or a non-pharmaceutical composition (e.g., a cosmetic composition and a food composition).

[0251] In one embodiment, the aforementioned composition is used for the treatment of an allergy (e.g., an allergy to wheat). As referred to herein, the “treatment of an allergy” increases the limit amount of an antigen in which the allergy does not develop even if the antigen is incorporated into the body, and finally aims for the state where the allergy does not develop by the common amount of the antigen to be consumed (remission).

[0252] The present invention also provides a method for treating an allergy, the method comprising administering at least one of the aforementioned antigens (1) to (14) to a patient in need of a treatment for an allergy.

[0253] In another embodiment, the present invention provides at least one of the aforementioned antigens (1) to (14), intended for use in the treatment for an allergy. In yet another embodiment, the present invention provides use of at least one of the aforementioned antigens (1) to (14) for the production of a therapeutic agent for an allergy.

[0254] In the process of allergy treatment, a hyposensitization therapy aiming to induce immunological tolerance by administering an antigen to a patient is often adopted. The at least one of the aforementioned antigens (1) to (14) can be used as an active ingredient for a hyposensitization therapy for an allergy. Here, the antigen protein to be used in the hyposensitization therapy may be a protein that has been expressed and purified and may be a protein that has been expressed in raw materials or processed products, such as rice-based vaccine expressing pollen allergens which are obtained by transforming rice with a gene of a cedar pollen antigen and expressing the antigen protein in the rice.

[0255] The composition of the present invention can be administered by common administration routes. Examples of common administration routes include oral, sublingual, percutaneous, intracutaneous, subcutaneous, intravascular, intranasal, intramuscular, intraperitoneal, and intrarectal administrations.

[0256] The composition of the present invention can be used as a composition to which a commonly used pharmaceutically acceptable adjuvant or excipient or any other additives (e.g., stabilizer, solubilizer, emulsifier, buffer, preservative, colorant) are added by a conventional method together with the antigen of this invention depending on the need. The dosage form of the composition can be selected by those skilled in the art as appropriate depending on the administration route. The composition can be in the form of, for example, tablet, capsule, troche, sublingual tablet, parenteral injection, intranasal spray, poultice, solution, cream, lotion, or suppository. The administration dose, frequency and/or period of the composition of this invention can be selected by a physician as appropriate depending on the administration route and the patient's condition and characteristics such as age and body weight. For example, the composition may be administered to an adult patient at a dose of not more than 100 μg per dose. The administration interval can be, for example, once daily, once weekly, twice weekly, once per three months or so. The administration period can be, for example, several weeks to several years. The composition may be administered in such a manner that the dose is increased in incremental steps over the administration period.

### Tester Composition (1)

[0257] The present invention provides a tester composition comprising an antibody for at least one of the aforementioned antigens (1) to (14).

[0258] The antibody can be prepared by a conventional method. For example, the antibody may be prepared by immunizing a mammal such as rabbit with one of the aforementioned antigens (1) to (14). The antibody may be an Ig antibody, a polyclonal antibody, a monoclonal antibody, or an antigen-binding fragment thereof (e.g., Fab, F(ab′) 2, Fab′).

[0259] Further, in the aforementioned tester composition, the antibody may be provided in a form bound to a carrier. The type of the carrier is not particularly limited as long as it is usable for detection of binding between an antibody and an antigen. Any given carrier known to those skilled in the art can be used.

[0260] Examples of a method for determining the presence or absence of an antigen include the following methods:
[0261] a method in which a prepared tester composition comprising an Ig antibody is contacted with a sample obtained from raw materials or processed products, etc., ELISA or the like method is used to detect whether there is a binding between the Ig antibody and an antigen in the sample, and if the binding between the Ig antibody and the antigen is detected, it is determined that the antigen is contained in the raw materials or processed products, etc. of interest; and
[0262] a method in which filter paper is impregnated with raw materials or processed products and reacted with an antibody solution so as to detect an antigen contained therein.

[0263] Another embodiment of the present invention includes a tester composition for determining the presence or absence of an antigen of an allergy in an object of interest, the tester composition comprising a primer having a nucleotide sequence complementary to a portion of at least one of the nucleotide sequences of SEQ ID NOs: 1, 3, 5, 7, 9, 11, 13, 15, 17, 19, 21, 23, 25 or 27. The primer has, for example, but not limited to, a nucleotide sequence complementary to, preferably, 12 bases, 15 bases, 20 bases, or 25 bases, in a 3′-terminal or central sequence in a partial sequence of at least one of the nucleotide sequences of SEQ ID NOs: 1, 3, 5, 7, 9, 11, 13, 15, 17, 19, 21, 23, 25 or 27. Particularly, when mRNA is of interest, the tester has a complementary primer of a poly-A tail. In a preferred embodiment, the tester composition comprising the primer mentioned above may further comprise a primer comprising a 5′-terminal nucleotide sequence, preferably a nucleotide sequence of 12 bases, 15 bases, 20 bases, or 25 bases, of at least one of the nucleotide sequences of SEQ ID NOs: 1, 3, 5, 7, 9, 11, 13, 15, 17, 19, 21, 23, 25 or 27.

[0264] For example, cDNA is amplified by PCR (Polymerase Chain Reaction) including RT-PCR (Reverse Transcription-Polymerase Chain Reaction) using templated DNA or mRNA obtained from wheat and the aforementioned complementary primer, and the sequence of the amplified cDNA is compared with SEQ ID NOs: 1, 3, 5, 7, 9, 11, 13, 15, 17, 19, 21, 23, 25 or 27 to determine the presence or absence of the antigen. Amplification methods by PCR can be exemplified by RACE (Rapid Amplification of cDNA End). In this respect, even if there exists a point mutation encoding the same amino acid in the comparison of the amplified cDNA with SEQ ID NOs: 1, 3, 5, 7, 9, 11, 13, 15, 17, 19, 21, 23, 25 or 27, or even if the nucleotide sequence of the amplified cDNA has insertion, deletion, substitution or addition of bases in the nucleotide sequences of SEQ ID NOs: 1, 3, 5, 7, 9, 11, 13, 15, 17, 19, 21, 23, 25 or 27, it is determined that the antigen is present when the amino acid sequence encoded by the cDNA has at least 70%, preferably at least 80, 90, 95, 98, or 99% identity to the amino acid sequence of SEQ ID NOs: 2, 4, 6, 8, 10, 12, 14, 16, 18, 20, 22, 24 or 28.

[0265] In one embodiment, the aforementioned tester composition, for example, is used to determine the presence or absence of an antigen in cooking ingredients (wheat) or in products of interest in a food production line. The tester composition may also be used for quality inspection of production lines and pre-shipment products by manufacturers, or may be used for self-checking of the presence or absence of an antigen in raw materials or processed products of interest by consumers. Also, it may be used for checking of the presence or absence of an antigen based on increase or decrease in the peak of the protein using a mass spectrometer.

### Method for Determining Presence or Absence of Antigen (1)

[0266] The present invention includes a method for determining the presence or absence of at least one of the aforementioned antigens (1) to (14) in a substance of interest, comprising contacting an antibody for the at least one of the aforementioned antigens (1) to (14) with a raw material or a processed product (including a liquid).

[0267] The raw material may be a cooking ingredient or may be a cosmetic raw material, a pharmaceutical raw material or the like. The processed product may be an edible processed product or may be a cosmetic, a pharmaceutical product or the like.

[0268] Such an antibody, a method for preparing the antibody, a method for contacting the antibody with a raw material or a processed product, the binding between the antibody and the antigen, etc. are as described above in the subsection titled “Tester composition (1)”.

### Antigen-Free Food and the Like (1)

[0269] The present invention provides a raw material or processed product in which at least one of the aforementioned antigens (1) to (14) is eliminated or reduced. In one embodiment, the “raw material or processed product” is “wheat or a processed product of wheat”.

[0270] The method for eliminating or reducing the antigen of the present invention in a raw material or processed products is not limited. The elimination or reduction of the antigen may be conducted by any method, as long as the method permits the elimination or reduction of the antigen.

[0271] For example, the raw material (e.g., wheat) of the present invention whose antigen is eliminated or reduced may be obtained by preparing a raw material in which the expression of the antigen of the present invention is modified, using a gene modification technique.

[0272] Any technique known to those skilled in the art can be used as the genetic modification technique. For example, Oishi, et al. (Scientific Reports, Vol. 6, Article number: 23980, 2016, doi: 10.1038/srep23980) states that individuals with ovomucoid gene deletion are obtained by applying a genome editing technique CRISPER/Cas9 to chicken primordial germ cells. The raw material of the present invention whose antigen is eliminated may be obtained through the use of a similar technique.

[0273] The wheat of the present invention whose antigen is reduced may be obtained by mating through artificial insemination with raw materials (e.g., wheat) containing no antigen or containing the antigen in a small amount. The artificial crossing of raw materials can be performed by a conventional method, for example, a method for pollinating selected breeds for the purpose of breed improvement of foods. For example, hypoallergenic wheat 1BS-18 Hokushin can be selected as antigen-deficient wheat for the selected breeds.

[0274] An antigen of the present invention may be the artefact that an antigen of the present invention assumed the removal or a reduced raw material as for the removal or the reduced processed products. In the case of using an ordinary raw material as a material, a treatment for removing or reducing the antigen of this invention is performed before or after preparation of a processed product. The methods for removing or reducing the antigen of the present invention in the processed products which assumed an ordinary raw material as a material include a method to remove protein component in raw materials or processed products such as a high pressure treatment and elution with the neutral salt solution or the high temperature steam, and a method to perform hydrolysis, denaturation, or amino acid alteration (chemical modification, elimination, or the like of a side chain) by heat treatment and acid treatment.

Method for Producing Raw Material or Processed Product in which Antigen is Eliminated or Reduced (1)

[0275] The present invention provides a method for producing a raw material or processed products in which an antigen is eliminated or reduced, the method comprising the step of confirming that the antigen is eliminated or reduced, in a production process of the processed product, wherein the antigen is at least one of the aforementioned antigens (1) to (14).

[0276] The step of confirming that the antigen is eliminated or reduced, in a production process of the raw materials or processed products in which an antigen is eliminated or reduced may be performed by confirming the presence or absence of an antigen by the method described above in the subsection titled “Tester Composition (1)”.

[0277] The production of the wheat or processed products of wheat in which an antigen is eliminated or reduced may be performed by the method described above in the subsection titled “Antigen-free food and the like”.

### Epitope

[0278] Epitopes and amino acids important for binding activity against IgE antibodies from allergic patients within the epitopes were identified as shown in Example 4 as to antigens identified as shown in Examples 1-3.

[0279] The results are summarized in Table 2.

TABLE 2
E1
Spot No. 9

| | | | | Food in which | | | |
|---|---|---|---|---|---|---|---|
| | | | SEQ ID | cross-reactivity | Graph | | SEQ ID |
| Protein name | LMW-D8(LMW-GS) B2BZD1 | | NO | was confirmed | No. | Synthetic sequence | NO |
| 15-residue | QQLLWYHQQQPIQQQ (positions 41-55 of | | 29 | | | | |
| sequence | SEQ ID NO: 18) | | | | | | |
| P2 | Key | QPIQ | 30 | | | | |
| P3 | More preferably | XXXXXXXQQXPIQQQ | 31 | | | | |
| | Preferably | XXXXXXXXQXXIQQQ | 32 | | | | |
| | Key | XXXXXXXXXXXIQQQ | 33 | | | | |
| | Preferably | QQPIQQ | 34 | | | | |
| | Key | XQXIQQ | 35 | | | | |
| P4 | More preferably | XXXXXYXQQXPIQQQ | 36 | | | | |
| | Preferably | XXXXXYXQQXXIQQQ | 37 | | | | |
| | Key | XXXXXXXQXXXIQQX | 38 | | | | |
| | Most preferably | HQQQPIQQ | 39 | | | | |
| | Further preferably | QQQPIQQ | 40 | | | | |
| | More preferably | QQQPIQ | 41 | | | | |
| | Preferably | QQXPIQ | 42 | | | | |
| | Key | QQXXIQ | 43 | | | | |
| P7 | Preferably | XXXXXYXQXXXIQQX | 44 | | | | |
| | Key | XXXXXXXQXXXIQQX | 45 | Wheat | 1 | QQLLWYHQQQPIQQQ | 29 |
| | | | | Barley | | NSQLIQMQQLQIQQQ | 2880 |
| | Preferably | QQQPIQQ | 46 | | | | |
| | Key | QXXXIQQ | 47 | | | | |
| | Preferably | QQPIQQ | 48 | | | | |
| | Key | QQPIQ | 49 | | | | |
| P8 | More preferably | QXXXWYHQQXPIQQQ | 50 | | | | |
| | Preferably | XXXXXYHQQXPIQQQ | 51 | | | | |
| | Key | XXXXXYXXXXXIQQQ | 52 | | | | |
| | More preferably | YHQQQPIQQ | 53 | | | | |
| | Preferably | HQQQPIQQ | 54 | | | | |
| | Key | HQQXPIQQ | 55 | | | | |
| | Key | QQQPIQQ | 56 | | | | |
| P9 | Preferably | QPIQQ | 57 | | | | |
| | Key | PIQQ | 58 | | | | |
| P10 | Key | QPIQQ | 59 | | | | |
| P12 | Preferably | QQPIQQ | 60 | | | | |
| | Key | QPIQ | 61 | | | | |
| P13 | Key | XXXXXYXQXXXIQQX | 62 | Wheat | 1 | QQLLWYHQQQPIQQQ | 29 |
| | | | | Barley | | NSQLIQMQQLQIQQQ | 2880 |
| | Preferably | QQQPIQQ | 63 | | | | |
| | Key | QXXXIQQ | 64 | | | | |
| | Key | QQQPIQ | 65 | | | | |
| P14 | Preferably | QQQPIQQ | 66 | | | | |
| | Key | QXXPIQQ | 67 | | | | |
| P15 | Preferably | QQQPIQQ | 68 | | | | |
| | Key | QXXXIQQ | 69 | | | | |
| | Key | QQQPIQ | 70 | | | | |
| P17 | Preferably | XXXLXYXQXXPIQQX | 71 | | | | |
| | Key | XXXXXXXQXXPIQQX | 72 | | | | |
| | Further preferably | HQQQPIQQ | 73 | | | | |
| | More preferably | QQQPIQQ | 74 | | | | |
| | Preferably | QQQPIQ | 75 | | | | |
| | Key | QXXPIQ | 76 | | | | |
| P19 | Preferably | QQQPIQQ | 77 | | | | |
| | Key | QXXPIQQ | 78 | | | | |
| P21 | Key | QQILWY | 79 | | | | |
| | Preferably | QQQPIQQ | 80 | | | | |
| | Key | QQPIQ | 81 | | | | |
| P22 | More preferably | QQQPIQQ | 82 | | | | |
| | Preferably | QXXPIQQ | 83 | | | | |
| | Key | QXXXIQQ | 84 | | | | |
| P24 | Key | QQILWYHQQQ | 85 | | | | |
| | Preferably | QQQPIQQ | 86 | | | | |
| | Key | QQQPIQ | 87 | | | | |
| P25 | Key | QQILWYH | 88 | | | | |
| | Key | QQPIQ | 89 | | | | |
| P26 | Key | XXXXXXXQXXPIQQX | 90 | | | | |
| | Preferably | QPIQQ | 91 | | | | |
| | Key | XPIQQ | 92 | | | | |
| P27 | Preferably | QQILXYHQQQPIQQQ | 93 | | | | |
| | Key | QQIXXYHQQXPIQQQ | 94 | | | | |
| | Preferably | YHQQQPIQQ | 95 | | | | |
| | Key | YHQQXPIQQ | 96 | | | | |
| P28 | Preferably | XXXXXYXQQXXIQQQ | 97 | | | | |
| | Key | XXXXXYXXQXXIQQX | 98 | | | | |
| | Further preferably | YHQQQPIQQ | 99 | | | | |
| | More preferably | QQQPIQQ | 100 | | | | |
| | Preferably | QQXXIQQ | 101 | | | | |
| | Key | XQXXIQQ | 102 | | | | |
| P31 | Key | QQILWYH | 103 | | | | |
| | Preferably | QQQPIQ | 104 | | | | |
| | Key | QQQPI | 105 | | | | |
| P32 | Key | XXXXXXXQQXPIQQX | 106 | | | | |
| | Key | QILWY | 107 | | | | |
| | Further preferably | HQQQPIQQ | 108 | | | | |
| | More preferably | QQQPIQ | 109 | | | | |
| | Preferably | QQXPIQ | 110 | | | | |
| | Key | QXXPXQ | 111 | | | | |
| P33 | Key | XXXXXXXQXXPIQQX | 112 | | | | |
| | More preferably | QQQPIQQ | 113 | | | | |
| | Preferably | QQQPIQ | 114 | | | | |
| | Key | QXXPIQ | 115 | | | | |
| P34 | Key | XXXXXXHXXXPIQQX | 116 | | | | |
| | Key | QQILWYHQQQ | 117 | | | | |
| | Preferably | QQQPIQQ | 118 | | | | |
| | Key | XXXPIQQ | 119 | | | | |
| | Key | QQPIQ | 120 | | | | |
| P35 | Key | YHQQQPIQQQ | 121 | | | | |
| P36 | Key | XXXXXXXQXXXIQQX | 122 | Wheat | 1 | QQLLWYHQQQPIQQQ | 29 |
| | | | | Barley | | NSQLIQMQQLQIQQQ | 2880 |
| | Preferably | QPIQQ | 123 | | | | |
| | Key | QPIQ | 124 | | | | |
| G6 | More preferably | XXILWYXQQQPIQQQ | 125 | | | | |
| | Preferably | XXILXYXQQQPIQQQ | 126 | | | | |
| | Key | XXXXXYXQQQPIQQQ | 127 | | | | |
| | More preferably | YHQQQPI | 128 | | | | |
| | Preferably | YHQQQP | 129 | | | | |
| | Key | YXQQQP | 130 | | | | |

E2
Spot No. 2

| | | | | Food in which | | | |
|---|---|---|---|---|---|---|---|
| | | | SEQ ID | cross-reactivity | Graph | | SEQ ID |
| Protein name | LMW-m glutenin subunit8 V9P767 | | NO | was confirmed | No. | Synthetic sequence | NO |
| 15-residue | PPFPQQHQQFPQQQI (positions 151-165 of | | 131 | | | | |
| sequence | SEQ ID NO: 4) | | | | | | |
| P2 | Key | XXXXXXXQQXPQQQI | 132 | | | | |
| | Key | QQFPQQQI | 133 | | | | |
| P3 | Preferably | XXXXXXXXXXPQQQI | 134 | | | | |
| | Key | XXXXXXXXXXXQQQI | 135 | | | | |
| P4 | Key | XXXXXXXQXXPQQQX | 136 | | | | |
| P7 | Key | FPQQHQQ | 137 | | | | |
| P8 | | | 138 | | | | |
| P9 | Key | XXXXXQXQQFPQQQI | 139 | | | | |
| P10 | Preferably | XXXXXXXQXXXQQQI | 140 | | | | |
| | Key | XXXXXXXXXXXQQQI | 141 | | | | |
| | Key | FPQQHQ | 142 | | | | |
| | More preferably | QQFPQQQI | 143 | | | | |
| | Preferably | QXXXQQQI | 144 | | | | |
| | Key | XXXXQQQI | 145 | | | | |
| P12 | Key | XXXXXXXQXXXQQQI | 146 | | | | |
| | Key | PFPQQHQQFP | 147 | | | | |
| P13 | Key | XXXXXXXQXXXQQQI | 148 | | | | |
| | Key | FPQQHQQ | 149 | | | | |
| P14 | Key | XXXXXXHQXXPQQQX | 150 | | | | |
| P15 | Preferably | FPQQHQQF | 151 | | | | |
| | Key | FPQQHQQ | 152 | | | | |
| P17 | More preferably | XXXXXXXQXXPQQQI | 153 | | | | |
| | Preferably | XXXXXXXQXXXQQQI | 154 | | | | |
| | Key | XXXXXXXXXXXQQQI | 155 | | | | |
| | Preferably | PPFPQQHQQF | 156 | | | | |
| | Key | FPQQHQQF | 157 | | | | |
| | Preferably | QQFPQQQI | 158 | | | | |
| | Key | FPQQQ | 159 | | | | |
| | Key | XXQQQI | 160 | | | | |
| P19 | Key | XXXXXXXQXXPQQQI | 161 | | | | |
| P21 | Key | XXXXXXXQXXXQQQI | 162 | | | | |
| P24 | Key | XXXXXXXQXXPQQQI | 163 | | | | |
| | Key | FPQQHQQ | 164 | | | | |
| P25 | Key | XXXXXXXXXXPQQQI | 165 | | | | |
| | Key | FPQQHQQ | 166 | | | | |
| P26 | Preferably | XXXXXXHQXXPQQQI | 167 | | | | |
| | Key | XXXXXXXQXXPQQQI | 168 | | | | |
| | Key | FPQQHQQF | 169 | | | | |
| P28 | Key | XXXXXXXQXXXQQQI | 170 | | | | |
| | Key | PPFPQQHQ | 171 | | | | |
| | Preferably | QQFPQQQI | 172 | | | | |
| | Key | QXXXQQQI | 173 | | | | |
| P31 | Key | XXXXXXXQXXXQQQI | 174 | | | | |
| P32 | Preferably | XXXXQQHQQXPQQQX | 175 | | | | |
| | Key | XXXXXXXQXXPQQQX | 176 | | | | |
| | Preferably | PPFPQQHQQ | 177 | | | | |
| | Key | XXXXQQHQQ | 178 | | | | |
| P33 | Key | XXXXXXXQXXPQQQX | 179 | | | | |
| P35 | Preferably | FPQQHQQFP | 180 | | | | |
| | Key | FPQQHQQF | 181 | | | | |
| | Key | QQFPQQQI | 182 | | | | |
| P36 | Preferably | XPXXQQHQQXPQQQI | 183 | | | | |
| | Key | XXXXQQHQXXPQQQI | 184 | | | | |
| | More preferably | PPFPQQHQQ | 185 | | | | |
| | Preferably | XPXXQQHQQ | 186 | | | | |
| | Key | XXXXQQHQX | 187 | | | | |
| | More preferably | QHQQFPQQQI | 188 | | | | |
| | Preferably | QHQQXPQQQI | 189 | | | | |
| | Key | XXQXXXQQQI | 190 | | | | |

E3
Spot No. 9

| | | | | Food in which | | | |
|---|---|---|---|---|---|---|---|
| | | | SEQ ID | cross-reactivity | Graph | | SEQ ID |
| Protein name | LMW-D8(LMW-GS) B2BZD1 | | NO | was confirmed | No. | Synthetic sequence | NO |
| 15-residue | SQQQQPFPQQQQPLL (positions 111-125 of | | 191 | | | | |
| sequence | SEQ ID NO: 18) | | | | | | |
| P2 | Preferably | XXQQQXFPQQQXPXX | 192 | | | | |
| | Key | XXXQQXFPQQQXXXX | 193 | | | | |
| | Most preferably | QQQQPFPQQQ | 194 | | | | |
| | Further preferably | QQPFPQQQ | 195 | | | | |
| | More preferably | QPFPQQ | 196 | | | | |
| | Preferably | QXFPQQ | 197 | | | | |
| | Key | QXXPQQ | 198 | | | | |
| P3 | Key | XQQQQPFPQQQQPXX | 199 | | | | |
| | Preferably | QQQQPFPQQQ | 200 | | | | |
| | Key | XXQQXFXQQQ | 201 | | | | |
| P4 | Preferably | XXXQQXFPQQQXXXX | 202 | | | | |
| | Key | XXXQQXXPQQXXXXX | 203 | Wheat | 1 | SQQQQPFPQQQQPLL | 191 |
| | | | | Orchard grass | | QEQQQYYPQQQAFFL | 2881 |
| | Further preferably | QQPFPQQ | 204 | | | | |
| | More preferably | QPFPQQ | 205 | | | | |
| | Preferably | QXFPQQ | 206 | | | | |
| | Key | QXXPQQ | 207 | | | | |
| P7 | Key | XQQQQXXPQQQXXXL | 208 | | | | |
| | Preferably | QQQQPFPQQQ | 209 | | | | |
| | Key | QQQQXXPQQQ | 210 | | | | |
| | More preferably | QPFPQQQQPL | 211 | | | | |
| | Preferably | QPFPQQQQP | 212 | | | | |
| | Key | QXXPQQQXX | 213 | | | | |
| P8 | More preferably | XQQQQXFPQQQXXXX | 214 | | | | |
| | Preferably | XXQQQXFPQQXXXXX | 215 | | | | |
| | Key | XXXQQXFXQQXXXXX | 216 | | | | |
| | More preferably | QQPFPQQQ | 217 | | | | |
| | Preferably | QQPFPQQ | 218 | | | | |
| | Key | QPFPQQ | 219 | | | | |
| P10 | Key | XXXQQXXPQQQXXXX | 220 | Wheat | 1 | SQQQQPFPQQQQPLL | 191 |
| | | | | Orchard grass | | QEQQQYYPQQQAFFL | 2881 |
| | Preferably | QQPFPQQQ | 221 | | | | |
| | Key | QQPF | 222 | | | | |
| P12 | Preferably | QQQQPFPQQQ | 223 | | | | |
| | Key | QPFPQQQ | 224 | | | | |
| | Preferably | QQPFPQQQQP | 225 | | | | |
| | Key | XQXXPQQQXP | 226 | | | | |
| P14 | | | 227 | | | | |
| | Preferably | QPFPQQQ | 228 | | | | |
| | Key | QPFP | 229 | | | | |
| P15 | Key | XXXQQPXPQQQQPLL | 230 | | | | |
| | More preferably | QQPFPQQQQP | 231 | | | | |
| | Preferably | QPFPQQQ | 232 | | | | |
| | Key | QPXPQQQ | 233 | | | | |
| P17 | Preferably | SXQXQPXPQXQXPLL | 234 | | | | |
| | Key | XXXXXPXPQXQXPXX | 235 | | | | |
| | More preferably | QPFPQQQQP | 236 | | | | |
| | Preferably | QPFPQQQ | 237 | | | | |
| | Key | PFPQ | 238 | | | | |
| P19 | Preferably | XQQXQXXPQQQQPXX | 239 | | | | |
| | Key | XXXXXXXPQQQQXXX | 240 | | | | |
| | More preferably | QQQQPFPQQQ | 241 | | | | |
| | Preferably | QQPFPQQQ | 242 | | | | |
| | Key | QQPFP | 243 | | | | |
| | Preferably | QQQPLLLQQ | 244 | | | | |
| | Key | QQQXXXLQQ | 245 | | | | |
| P21 | Key | QQPFPQQ | 246 | | | | |
| P22 | Preferably | QPFPQQQ | 247 | | | | |
| | Key | QPFPQQ | 248 | | | | |
| P24 | Preferably | XQQQQXFPQQXXXXX | 249 | | | | |
| | Key | XXQQXXFPQQXXXXX | 250 | | | | |
| | More preferably | QQPFPQQ | 251 | | | | |
| | Preferably | QQXFPQQ | 252 | | | | |
| | Key | QXXFPQQ | 253 | | | | |
| P26 | Key | SQQXQPXPQQQQPXX | 254 | | | | |
| | More preferably | QQPFPQQQ | 255 | | | | |
| | Preferably | QPFPQQQ | 256 | | | | |
| | Key | QPXPQQQ | 257 | | | | |
| | Key | FPQQ | 258 | | | | |
| P27 | | | 259 | | | | |
| P28 | Preferably | XQQQQXXPQQQQPLL | 260 | | | | |
| | Key | XXXXQXXPQQQQPLL | 261 | | | | |
| | Preferably | QPFPQQQQP | 262 | | | | |
| | Key | QPFPQQQ | 263 | | | | |
| P31 | More preferably | XXXXQX FPQQQQPLL | 264 | | | | |
| | Preferably | XXXXXXXPQQQQPLL | 265 | | | | |
| | Key | XXXXXXXXXQQQPXX | 266 | | | | |
| | Kev | QQPFPQQQ | 267 | | | | |
| P32 | Preferably | XXQQQXFPQQQXXXX | 268 | Wheat | 1 | SQQQQPFPQQQQPLL | 191 |
| | | | | Orchard grass | | QHQQQYYPQQQAFFL | 2881 |
| | | | 269 | | | | |
| | More preferably | QQPFPQQQ | 270 | | | | |
| | Preferably | QPFPQQQ | 271 | | | | |
| | Key | QPFP | 272 | | | | |
| P33 | | | 273 | | | | |
| | Key | QPFPQQQ | 274 | | | | |
| P35 | Preferably | XXXXXXFPQQQQPXL | 275 | | | | |
| | Key | XXXXXXXPQXXQPXL | 276 | | | | |
| | Preferably | QQPFPQQQ | 277 | | | | |
| | Key | QPFPQQQ | 278 | | | | |
| P36 | Key | QQPFPQQ | 279 | | | | |
| P52 | Key | XQXXQPIPXQXXXXX | 280 | | | | |

E4
Spot No. 7

| | | | | Food in which | | | |
|---|---|---|---|---|---|---|---|
| | | | SEQ ID | cross-reactivity | Graph | | SEQ ID |
| Protein name | Gamma gliadin-A1 M9TG60 | | NO | was confirmed | No. | Synthetic sequence | NO |
| 15-residue | QQPQQPFPQQQQPLI (positions 171-185 of | | 281 | | | | |
| sequence | SEQ ID NO: 14) | | | | | | |
| P2 | More preferably | QQPQQXXPQQXXXXX | 282 | | | | |
| | Preferably | QXPQQXXPQQXXXXX | 283 | | | | |
| | Key | QXXQQXXPQQXXXXX | 284 | | | | |
| | Further preferably | QPFPQQQQP | 285 | | | | |
| | More preferably | QPFPQQQQ | 286 | | | | |
| | Preferably | QPFPQQQ | 287 | | | | |
| | Key | QXXPQQX | 288 | | | | |
| P4 | Key | XXPQQXFPQQXXXXX | 289 | | | | |
| | More preferably | QQPFPQQQ | 290 | | | | |
| | Preferably | QPFPQQ | 291 | | | | |
| | Key | QXFPQQ | 292 | | | | |
| P7 | Preferably | QPQQPQQP | 293 | | | | |
| | Key | QPQQP | 294 | | | | |
| | Preferably | QPFPQQQQPL | 295 | | | | |
| | Key | QPFPQQQQP | 296 | | | | |
| P12 | Key | QPFPQQQ | 297 | | | | |
| P14 | Key | XXXQQXXPQQQXXXX | 298 | | | | |
| | Key | QPFPQQQ | 299 | | | | |
| P15 | Key | XXPQQXXPQQQXXXX | 300 | | | | |
| | More preferably | QPFPQQQQ | 301 | | | | |
| | Preferably | PFPQQQ | 302 | | | | |
| | Key | XXPQQQX | 303 | | | | |
| P19 | Preferably | XQPQQXXPQQXXXLI | 304 | | | | |
| | Key | XQPQQXXPQQXXXXX | 305 | | | | |
| | Key | QPFPQQQQ | 306 | | | | |
| P21 | Preferably | QQPFPQQ | 307 | | | | |
| | Key | QPFPQQ | 308 | | | | |
| P22 | Key | XQPQQXXPXQQXPXX | 309 | | | | |
| | Preferably | QPFPQQQQP | 310 | | | | |
| | Key | QPFPQQQ | 311 | | | | |
| P24 | Key | XXPQQXXXQQXXXXX | 312 | | | | |
| | More preferably | QQPQQPFPQQ | 313 | | | | |
| | Preferably | QQPFPQQQQ | 314 | | | | |
| | Key | QPFPQQ | 315 | | | | |
| P26 | Key | XXPQQXXXXQXXXXX | 316 | | | | |
| | Preferably | QPFPQQQ | 317 | | | | |
| | Key | QPFPQQ | 318 | | | | |
| P27 | Key | QQPQQPFPQQQQPXX | 319 | | | | |
| | Preferably | QPFPQQQQ | 320 | | | | |
| | Key | QPFPQQQ | 321 | | | | |
| P28 | Key | XXPQQXXPQQQXXXX | 322 | | | | |
| | Key | QPFPQQQQ | 323 | | | | |
| P32 | Key | XXXXQXXPQQQXXXX | 324 | | | | |
| | More preferably | QPFPQQQ | 325 | | | | |
| | Preferably | QPFPQQ | 326 | | | | |
| | Key | PFPQQ | 327 | | | | |
| P33 | Key | XXXXQXXPQQQXXXX | 328 | | | | |
| | More preferably | QPQQPFPQQQ | 329 | | | | |
| | Preferably | QPFPQQQQP | 330 | | | | |
| | Key | QPFPQQQ | 331 | | | | |
| P34 | Key | XXXQQXFXQQQXXXX | 332 | | | | |
| | Preferably | PQQPFPQQQQ | 333 | | | | |
| | Key | PQQPFPQ | 334 | | | | |
| | Key | FPQQQQPLI | 335 | | | | |
| P35 | Preferably | XXPQQXFPQXXXXXX | 336 | | | | |
| | Key | XXXQQXFPQXXXXXX | 337 | | | | |
| | Preferably | QPFPQQQ | 338 | | | | |
| | Key | QPFPQQ | 339 | | | | |
| P36 | Preferably | QQPFPQQQQP | 340 | | | | |
| | Key | QPFPQQQ | 341 | | | | |
| P50 | | | 342 | | | | |
| P52 | Preferably | QPQQPFP | 343 | | | | |
| | Key | QXXQPFX | 344 | | | | |
| | Key | QPFP | 345 | | | | |

E5
Spot No. 3

| | | | | Food in which | | | |
|---|---|---|---|---|---|---|---|
| | | | SEQ ID | cross-reactivity | Graph | | SEQ ID |
| Protein name | Gamma-gliadin P08453 | | NO | was confirmed | No. | Synthetic sequence | NO |
| 15-residue | PQQSFPQQQRPFIQP (positions 161-175 of | | 346 | | | | |
| sequence | SEQ ID NO: 6) | | | | | | |
| P2 | Preferably | QSFPQQQRP | 347 | | | | |
| | Key | QSFPQQQR | 348 | | | | |
| P3 | Preferably | QQSFPQQQ | 349 | | | | |
| | Key | QSFPQQ | 350 | | | | |
| | Key | RPFIQ | 351 | | | | |
| P7 | Preferably | QSFPQQQR | 352 | | | | |
| | Key | QSFPQQQ | 353 | | | | |
| | Key | QQQRPFIQP | 354 | | | | |
| P8 | Preferably | SFPQQQR | 355 | | | | |
| | Key | SFPQQQ | 356 | Wheat/barley | 3 | SFPQQQ | 2882 |
| P9 | Preferably | QSFPQQQ | 357 | | | | |
| | Key | SFPQQQ | 358 | | | | |
| | Preferably | QQQRPFIQP | 359 | | | | |
| | Key | RPFIQP | 360 | | | | |
| P10 | Key | QSFPQQQ | 361 | | | | |
| | Key | RPFIQP | 362 | | | | |
| P12 | More preferably | QSFPQQQRP | 363 | | | | |
| | Preferably | QSFPQQQ | 364 | | | | |
| | Key | SFPQQQ | 365 | | | | |
| | Key | RPFIQP | 366 | | | | |
| P13 | Preferably | QSFPQQQRP | 367 | | | | |
| | Key | QSFPQQ | 368 | | | | |
| P14 | Preferably | QPQQSFPQQQ | 369 | | | | |
| | Key | QXXQXXXQQQ | 370 | | | | |
| | Preferably | QSFPQQQ | 371 | | | | |
| | Key | QSFPQQ | 372 | | | | |
| | Key | QSFPQQQRPF | 373 | | | | |
| P15 | Preferably | QQSFPQQQRP | 374 | | | | |
| | Key | QSFPQQQ | 375 | | | | |
| P17 | Key | RPFIQP | 376 | | | | |
| P19 | Preferably | QSFPQQQR | 377 | | | | |
| | Key | QSFPQQQ | 378 | | | | |
| P21 | More preferably | QQSFPQQQRP | 379 | | | | |
| | Preferably | QSFPQQQ | 380 | | | | |
| | Key | QSFP | 381 | | | | |
| P22 | Key | XXQXXXQQQRXXXXX | 382 | | | | |
| | More preferably | QSFPQQQRP | 383 | | | | |
| | Preferably | QSFPQQQR | 384 | | | | |
| | Key | QXXXQQQR | 385 | | | | |
| | Further preferably | PQQQRPFIQP | 386 | | | | |
| | More preferably | RPFIQPSLQQ | 387 | | | | |
| | Preferably | RPFIQPSLQ | 388 | | | | |
| | Key | RPFIQP | 389 | | | | |
| P24 | Key | XXQXXXQQQXPXXXX | 390 | | | | |
| | Key | PQQSFPQQQR | 391 | | | | |
| | Preferably | PQQQRPFIQP | 392 | | | | |
| | Key | XQQQXPXXXX | 393 | | | | |
| P25 | Key | QSFP | 394 | | | | |
| | Key | RPFIQPS | 395 | | | | |
| P26 | Preferably | QSFPQQQ | 396 | | | | |
| | Key | QSFP | 397 | | | | |
| | Key | RPFIQ | 398 | | | | |
| P27 | | | 399 | | | | |
| P28 | Key | QSFP | 400 | | | | |
| | Preferably | PQQQRPFIQ | 401 | | | | |
| | Key | QQQRPFIQ | 402 | | | | |
| P31 | Key | QSFP | 403 | | | | |
| P32 | Preferably | QSFPQQQ | 404 | | | | |
| | Key | QSFPQQ | 405 | | | | |
| P33 | Preferably | QSFPQQQRP | 406 | | | | |
| | Key | QSFPQQQ | 407 | | | | |
| P34 | Key | QQSFP | 408 | | | | |
| | Key | RPFIQP | 409 | | | | |
| P35 | Key | SFPQQ | 410 | | | | |
| P36 | Key | QSFPQQQR | 411 | | | | |
| | Key | RPFIQ | 412 | | | | |
| P52 | Key | RPFI | 413 | | | | |

E6
Spot No. 4

| | | | | Food in which | | | |
|---|---|---|---|---|---|---|---|
| | | | SEQ ID | cross-reactivity | Graph | | SEQ ID |
| Protein name | Fructose-b sphosphate aldolase W5CCA9 | | NO | was confirmed | No. | Synthetic sequence | NO |
| 15-residue | KWRAVLKIGATEPSQ (positions 133-147 of | | 414 | | | | |
| sequence | SEQ ID NO: 8) | | | | | | |
| P2 | Preferably | RAVLKIGATE | 415 | | | | |
| | Key | ATEPSQ | 416 | | | | |
| P7 | Preferably | KXRXXXKIGATEPSQ | 417 | | | | |
| | Key | XXXXXXXXGAXEPSQ | 418 | | | | |
| | Preferably | KIGATEPS | 419 | | | | |
| | Key | XXGAXEPS | 420 | | | | |
| P8 | Preferably | WRAVLKIGA | 421 | | | | |
| | Key | RAVLKIG | 422 | | | | |
| P10 | Key | XXXXXXKXXXTXPSQ | 423 | | | | |
| | Key | IGATE | 424 | | | | |
| P12 | Key | XXRXXXKIGATXPSQ | 425 | | | | |
| | Key | AVLKIG | 426 | | | | |
| P14 | More preferably | WRAVLKIGA | 427 | | | | |
| | Preferably | WRAVL | 428 | | | | |
| | Key | RAVL | 429 | | | | |
| | Preferably | KIGATEPSQ | 430 | | | | |
| | Key | ATEPSQ | 431 | | | | |
| P16 | Key | RAVLKIGA | 432 | | | | |
| | Preferably | VLKIGATEPS | 433 | | | | |
| | Key | IGATEPS | 434 | | | | |
| P17 | Key | XXXXXXKXXAXXPSQ | 435 | | | | |
| | Key | KIGATEP | 436 | | | | |
| P19 | Preferably | KIGATEPSQ | 437 | | | | |
| | Key | KXXAXXPXQ | 438 | | | | |
| P20 | Key | XXXXXXKXGAXEXXQ | 439 | | | | |
| | Preferably | KIGATE | 440 | | | | |
| | Key | KXGAXE | 441 | | | | |
| P21 | Key | KWRXXXXXXXXXPSQ | 442 | | | | |
| | More preferably | KWRAVLKIGA | 443 | | | | |
| | Preferably | WRAVLKIG | 444 | | | | |
| | Key | RAVL | 445 | | | | |
| | Preferably | IGATEPSQ | 446 | | | | |
| | Key | ATEPS | 447 | | | | |
| P22 | Preferably | KWRAXXKXXXTEPSQ | 448 | | | | |
| | Key | KXRXXXKXXXXEPSQ | 449 | | | | |
| | More preferably | AKWRAVLKIG | 450 | | | | |
| | Preferably | AKWRAXXKXX | 451 | | | | |
| | Key | AKXRXXXKXX | 452 | | | | |
| | Key | VLKI | 453 | | | | |
| P24 | Key | XXXXXXKXXAXEPSQ | 454 | | | | |
| | More preferably | KIGATEPS | 455 | | | | |
| | Preferably | KIGATEP | 456 | | | | |
| | Key | IGATE | 457 | | | | |
| P27 | Key | KXXXXXKXGXXXPSQ | 458 | | | | |
| | Preferably | WRAVLKIGAT | 459 | | | | |
| | Key | RAVLKIGA | 460 | | | | |
| | Preferably | GATEPSQ | 461 | | | | |
| | Key | GXXXPSQ | 462 | | | | |
| | Key | GATEPS | 463 | | | | |
| P28 | Preferably | KIGATEPS | 464 | | | | |
| | Key | IGATEPS | 465 | | | | |
| P33 | Preferably | KWRXXXXXGATEPSQ | 466 | | | | |
| | Key | KXRXXXXXXXTEPSQ | 467 | | | | |
| | Key | RAVLKI | 468 | | | | |
| P35 | Preferably | XXXXXXKIGAXEPSQ | 469 | | | | |
| | Key | XXXXXXKIXXXXPSQ | 470 | | | | |
| | Preferably | KWRAVLKIGA | 471 | | | | |
| | Key | XXXXXXKIGA | 472 | | | | |
| | Preferably | RAVLKIGATE | 473 | | | | |
| | Key | XXXXKIGAXE | 474 | | | | |
| | Most preferably | VLKIGATEPS | 475 | | | | |
| | Further preferably | LKIGATEPS | 476 | | | | |
| | More preferably | KIGATEPS | 477 | | | | |
| | Preferably | KIGAXEPS | 478 | | | | |
| | Key | KIXXXXPS | 479 | | | | |
| P36 | Key | XXXXXXKXGAXXXXQ | 480 | | | | |
| | Preferably | RAVLKIGA | 481 | | | | |
| | Key | LKIG | 482 | | | | |
| G1 | Key | XXXXXXKXXAXXPSQ | 483 | Wheat/rye/barley | 4 | LKIGATEPSQ | 2883 |
| | Preferably | LKIGATEPSQ | 484 | | | | |
| | Key | XKXXAXXPSQ | 485 | | | | |
| | Preferably | KIGATE | 486 | | | | |
| | Key | IGAT | 487 | Wheat/rye/barley/ | 4 | IGAT | 2884 |
| | | | | timothy/orchard | | | |
| | | | | grass | | | |
| G2 | Key | KWRAVLKIG | 488 | | | | |
| | Key | KIGATEPS | 489 | | | | |
| G7 | More preferably | KWRAVLKIGA | 490 | | | | |
| | Preferably | KIGATE | 491 | | | | |
| | Key | KIGA | 492 | | | | |

E7
Spot No. 5

| | | | | Food in which | | | |
|---|---|---|---|---|---|---|---|
| | | | SEQ ID | cross-reactivity | Graph | | SEQ ID |
| Protein name | Alpha-gliadin Gli2-LM2-12 Q1WA40 | | NO | was confirmed | No. | Synthetic sequence | NO |
| 15-residue | PQQPYPQQQPQYLQP (positions 101-115 of | | 493 | | | | |
| sequence | SEQ ID NO: 10) | | | | | | |
| P2 | Key | PXXXXXQQQPQYLQP | 494 | | | | |
| | Key | QQQP | 495 | | | | |
| P4 | Key | QPYPQQQ | 496 | | | | |
| | Key | YPQQQPQYLQ | 497 | | | | |
| P5 | Key | XXXXXXQQQXQXXXX | 498 | | | | |
| | Key | YPQQ | 499 | | | | |
| P7 | Key | PQQPYPQQQ | 500 | | | | |
| | Preferably | QPYPQQQPQY | 501 | | | | |
| | Key | XXXXQQQPQY | 502 | | | | |
| | Preferably | YPQQQPQYLQ | 503 | | | | |
| | Key | XXQQQPQYXX | 504 | | | | |
| P9 | Key | PQQQP | 505 | | | | |
| P10 | Key | XXXXXXXQQXQYLXX | 506 | | | | |
| P12 | Key | XXXXXXXQQPQYXXX | 507 | | | | |
| P14 | Preferably | QPYPQQQ | 508 | | | | |
| | Key | YPQQQ | 509 | | | | |
| P15 | Key | XXQXXXQQQXQYLXX | 510 | | | | |
| | Preferably | QPYPQQQPQ | 511 | | | | |
| | Key | QPYPQQQ | 512 | | | | |
| | Preferably | YPQQQPQYLQ | 513 | | | | |
| | Key | XXQQQXQYLX | 514 | | | | |
| P17 | Key | XXXXXXXXXXXYLQP | 515 | | | | |
| | Key | PQQPYPQQQP | 516 | | | | |
| | Key | QQQPQY | 517 | | | | |
| P19 | Key | XXXXXXXQQXQXXXP | 518 | | | | |
| | Key | QQPYPQQQPQ | 519 | | | | |
| | Preferably | YPQQQPQYLQ | 520 | | | | |
| | Key | YPQQQP | 521 | | | | |
| P21 | More preferably | YPQQQPQYLQ | 522 | | | | |
| | Preferably | QPYPQQ | 523 | | | | |
| | Key | YPQQ | 524 | | | | |
| P22 | Key | XXQXXPQQQPQYXXX | 525 | | | | |
| | Further preferably | PYPQQQPQYL | 526 | | | | |
| | More preferably | PYPQQQPQ | 527 | | | | |
| | Preferably | XXPQQQPQ | 528 | | | | |
| | Key | XXXQQQPQ | 529 | | | | |
| P24 | Key | XXXXYPQQQPQYXXX | 530 | | | | |
| | More preferably | QQPYPQQQ | 531 | | | | |
| | Preferably | QQPYPQQ | 532 | | | | |
| | Key | XXXYPQQ | 533 | | | | |
| | Preferably | YPQQQPQYLQ | 534 | | | | |
| | Key | YPQQQPQYXX | 535 | | | | |
| P25 | Preferably | XXQXXXXQQXQYLQX | 536 | | | | |
| | Key | XXXXXXXQQXXYLXX | 537 | | | | |
| | Key | QQQP | 538 | | | | |
| P26 | Key | YPQQQ | 539 | | | | |
| P27 | Key | PXQXXXQXXXXYLXX | 540 | | | | |
| P28 | Preferably | XXXXXXXQQPQYLQP | 541 | | | | |
| | Key | XXXXXXXXQXQYLQP | 542 | | | | |
| | Key | PQQPYPQQQ | 543 | | | | |
| | Preferably | YPQQQPQY | 544 | | | | |
| | Key | XXXQQPQY | 545 | | | | |
| P32 | Key | XXQXXXXQXXXYLXX | 546 | | | | |
| | Key | PQQQ | 547 | | | | |
| P33 | Key | XXQXXXQQQPQXXXX | 548 | | | | |
| | More preferably | QPYPQQQ | 549 | | | | |
| | Preferably | YPQQQPQYLQ | 550 | | | | |
| | Key | PQQQ | 551 | | | | |
| P34 | Key | QPQYLQ | 552 | | | | |
| P35 | Key | XXXXXXXQXXQYLXX | 553 | | | | |
| P36 | | | | | | | |
| G4 | Key | XXQPYPQQQPQYXQP | 554 | | | | |
| | Preferably | PQQPYPQQQP | 555 | | | | |
| | Key | XXQPYPQQQP | 556 | | | | |
| | More preferably | YPQQQPQYLQ | 557 | | | | |
| | Preferably | YPQQQPQY | 558 | | | | |
| | Key | XXXQQPQY | 559 | | | | |
| G6 | Key | QQQPQY | 560 | | | | |
| G7 | Key | PQQPYP | 561 | | | | |

E8
Spot No. 9

| | | | | Food in which | | | |
|---|---|---|---|---|---|---|---|
| | | | SEQ ID | cross-reactivity | Graph | | SEQ ID |
| Protein name | LMW-D8(LMW-GS) B2BZD1 | | NO | was confirmed | No. | Synthetic sequence | NO |
| 15-residue | KPSQQQPLPLQQLLW (positions 31-45 of SEQ | | 562 | | | | |
| sequence | ID NO: 18) | | | | | | |
| P2 | Key | XXXQQQXXXLQQXXX | 563 | | | | |
| | Key | KPSQQQ | 564 | | | | |
| | Preferably | QQPLPLQQ | 565 | | | | |
| | Key | QQXXXLQQ | 566 | | | | |
| P7 | Preferably | PSQQQ | 567 | | | | |
| | Key | SQQQ | 568 | | | | |
| P9 | Key | SQQQPLPL | 569 | | | | |
| P10 | Key | XXXXQQXXPLQQXXX | 570 | | | | |
| | Further preferably | QPLPLQQIL | 571 | | | | |
| | More preferably | QPLPLQQI | 572 | | | | |
| | Preferably | QXXPLQQX | 573 | | | | |
| | Key | QXXXLQQX | 574 | | | | |
| P14 | More preferably | XXXXQQPXPLQQXXX | 575 | | | | |
| | Preferably | XXXXQQXXPLQQXXX | 576 | | | | |
| | Key | XXXXXQXXPLQQXXX | 577 | | | | |
| | Preferably | QPLPLQQ | 578 | | | | |
| | Key | PLQQ | 579 | | | | |
| P15 | Preferably | XXXQXQPXPLQQIXX | 580 | | | | |
| | Key | XXXXXQPXPLQQIXX | 581 | | | | |
| | More preferably | QPLPLQQ | 582 | | | | |
| | Preferably | QPXPLQQ | 583 | | | | |
| | Key | QXXPLQQ | 584 | | | | |
| P17 | Preferably | XXXXXQPXPLQQXXX | 585 | | | | |
| | Key | XXXXXXPXPLQQXXX | 586 | | | | |
| | Key | LEKPSQQQPL | 587 | | | | |
| | Key | KPSQQQ | 588 | | | | |
| | More preferably | QQPLPLQQ | 589 | | | | |
| | Preferably | XQPXPLQQ | 590 | | | | |
| | Key | XXPXPLQQ | 591 | | | | |
| P21 | Key | KXXXXQXXXLQXXXX | 592 | | | | |
| P22 | Preferably | XXSQQQXXPLQQXXX | 593 | | | | |
| | Key | XXXXQQXXPLQQXXX | 594 | | | | |
| | Further preferably | QQPLPLQQI | 595 | | | | |
| | More preferably | QPLPLQQ | 596 | | | | |
| | Preferably | QXXPLQQ | 597 | | | | |
| | Key | QXXPLQX | 598 | | | | |
| P24 | Key | KXSQQQXXXXXXXXX | 599 | | | | |
| | Preferably | KPSQQQ | 600 | | | | |
| | Key | SQQQ | 601 | | | | |
| P25 | Preferably | KPSXQQPLPLQQXXX | 602 | | | | |
| | Key | XXXXXQPLPLQQXXX | 603 | | | | |
| | Preferably | QPLPLQQ | 604 | | | | |
| | Key | QPXPLQQ | 605 | | | | |
| P26 | Preferably | XXSQQQPXPLQQIXX | 606 | | | | |
| | Key | XXXQQQXXPLQQXXX | 607 | | | | |
| | More preferably | QPLPLQQ | 608 | | | | |
| | Preferably | QPXPLQQ | 609 | | | | |
| | Key | QXXPLQQ | 610 | | | | |
| | Key | PLQQ | 611 | | | | |
| P27 | More preferably | XPXQXQPLPLQQLLX | 612 | | | | |
| | Preferably | XXXXXQPLPLQQLLX | 613 | | | | |
| | Key | XXXXXQPLPLQQIXX | 614 | | | | |
| | Preferably | KPSQQQPL | 615 | | | | |
| | Key | KPSQQQ | 616 | | | | |
| | Preferably | QQPLPLQQ | 617 | | | | |
| | Key | XQPLPLQQ | 618 | | | | |
| P28 | Preferably | XXSQQQPXPLQQIXX | 619 | | | | |
| | Key | XXXXXQPXPLQQXXX | 620 | | | | |
| | Most preferably | QPLPLQQI | 621 | | | | |
| | Further preferably | QPLPLQQ | 622 | | | | |
| | More preferably | QPXPLQQ | 623 | | | | |
| | Preferably | QPXPLQQ | 624 | | | | |
| | Key | QXXPLQQ | 625 | | | | |
| P32 | More preferably | XXXXQQPLPLQQXXX | 626 | | | | |
| | Preferably | XXXXXQXLPLQQXXX | 627 | | | | |
| | Key | XXXXXQXXXLQQXXX | 628 | | | | |
| | Key | PLQQ | 629 | | | | |
| P33 | Key | XXXXXQXXXLQQXXX | 630 | | | | |
| | Key | QPLPLQQ | 631 | | | | |
| P34 | Key | KPSQQQPLP | 632 | | | | |
| P35 | Key | SQQQ | 633 | | | | |
| | Key | LQQIL | 634 | | | | |
| P36 | Preferably | KXXXQQXXPLQQXXX | 635 | | | | |
| | Key | XXXXXQXXXLQQXXX | 636 | | | | |
| | Key | KPSQQQ | 637 | | | | |
| | Preferably | PLQQI | 638 | | | | |
| | Key | LQQI | 639 | | | | |

E9
Spot No. 1, 5, 6

| | | | | Food in which | | | |
|---|---|---|---|---|---|---|---|
| | | | SEQ ID | cross-reactivity | Graph | | SEQ ID |
| Protein name | Alpha/beta-gliadin MM1 P18573 | | NO | was confirmed | No. | Synthetic sequence | NO |
| 15-residue | QVPLVQQQQFPGQQQ (positions 41- | | 640 | | | | |
| sequence | 55 of SEQ ID NOs: 2, 10 and 12) | | | | | | |
| P2 | Key | PLVQ | 641 | | | | |
| | Key | QQQFPGQQQ | 642 | | | | |
| P3 | More preferably | QVPLVQQ | 643 | | | | |
| | Preferably | QVPLVQ | 644 | | | | |
| | Key | QXXLXQQ | 645 | | | | |
| P7 | Key | QXXXVQQXXXXXXXX | 646 | | | | |
| | More preferably | QEQVPLVQQ | 647 | | | | |
| | Preferably | EQVPLVQ | 648 | | | | |
| | Key | EQXXXVQ | 649 | | | | |
| | Key | QVPLVQ | 650 | | | | |
| | Key | QQQFPGQQQ | 651 | | | | |
| P8 | Key | QXXLVQQXXXXXXXX | 652 | | | | |
| | More preferably | QVPLVQQ | 653 | | | | |
| | Preferably | PLVQQ | 654 | Wheat/rye | 2 | PLVQQ | 2886 |
| | Key | XLVQQ | 655 | Wheat/barley | 2 | KLVQQ | 2887 |
| | Preferably | QQQQFPGQQQ | 656 | | | | |
| | Key | QQFPGQQQ | 657 | Wheat/rye | 3 | QQFPGQQQ | 2888 |
| P12 | Key | QXXXVQQXXXXXXXX | 658 | | | | |
| | Preferably | QVPLVQQ | 659 | | | | |
| | Key | QXXXVQQ | 660 | | | | |
| | Preferably | QVPLVQ | 661 | | | | |
| | Key | VPLVQ | 662 | | | | |
| | Key | QQFPGQQQ | 663 | | | | |
| P14 | More preferably | QQQQFPGQQQ | 664 | | | | |
| | Preferably | QQQFPGQQQ | 665 | | | | |
| | Key | QQFPGQQ | 666 | | | | |
| P17 | Preferably | FPGQQQP | 667 | | | | |
| | Key | FPGQQQ | 668 | | | | |
| P19 | Key | XXXXXQQQXXXXXQQ | 669 | Wheat/rye/ | 2 | QVPLVQQQQFPGQQQ | 640 |
| | | | | orchard grass | 2 | QQYYPQQQAFFLLQQ | 2885 |
| | More preferably | QEQVPLVQQQ | 670 | | | | |
| | Preferably | EQVPLVQQQ | 671 | | | | |
| | Key | EXXXXXQQQ | 672 | | | | |
| | Preferably | PLVQQQQFP | 673 | | | | |
| | Key | LVQQ | 674 | | | | |
| | Preferably | QQFPGQQQ | 675 | | | | |
| | Key | QFPGQQQ | 676 | | | | |
| P21 | Preferably | QVPLVQQ | 677 | | | | |
| | Key | QVPLVQ | 678 | | | | |
| | Key | QQFPGQQQ | 679 | | | | |
| P22 | Key | FPGQ | 680 | | | | |
| P24 | Preferably | QXPXVQQQQFPXQQQ | 681 | | | | |
| | Key | QXPXVQQXXXXXXQQ | 682 | | | | |
| | Preferably | QFPGQQQ | 683 | | | | |
| | Key | QFPXQQQ | 684 | | | | |
| P26 | Key | QVPLVQ | 685 | | | | |
| | Key | FPGQQ | 686 | | | | |
| P28 | Key | XXXXXQXQXXPXQXQ | 687 | | | | |
| | Key | PLVQQQQFPG | 688 | | | | |
| | Preferably | QQFPGQQQ | 689 | | | | |
| | Key | QXXPXQXQ | 690 | | | | |
| P32 | Key | XXPXXXXXQXXXQQQ | 691 | | | | |
| | Preferably | QQQQFPGQQQ | 692 | | | | |
| | Key | QQQFPGQQ | 693 | | | | |
| P33 | Key | VPLVQ | 694 | | | | |
| | Key | FPGQQ | 695 | | | | |
| P34 | Key | PLVQ | 696 | | | | |
| | Key | QQQFPGQQQ | 697 | | | | |
| P35 | More preferably | FPGQQQPFP | 698 | | | | |
| | Preferably | FPGQQQPF | 699 | | | | |
| | Key | FPGQQQ | 700 | | | | |
| P36 | Preferably | PLVQQQQF | 701 | | | | |
| | Key | PLVQQ | 702 | | | | |
| | Key | FPGQQQ | 703 | | | | |
| P50 | Key | PLVQQQQFP | 704 | | | | |
| | Key | QQQFPGQQ | 705 | | | | |

E10
Spot No. 4

| | | | | Food in which | | | |
|---|---|---|---|---|---|---|---|
| | | | SEQ ID | cross-reactivity | Graph | | SEQ ID |
| Protein name | Fructose-b sphosphate aldolase W5CCA9 | | NO | was confirmed | No. | Synthetic sequence | NO |
| 15-residue | VLLFEETLYQSTKGG (positions 63-77 of | | 706 | | | | |
| sequence | SEQ ID NO: 8) | | | | | | |
| P2 | Key | XXXXXXXXYXXTKXG | 707 | | | | |
| | Preferably | QSTKGG | 708 | | | | |
| | Key | QSTKG | 709 | | | | |
| P3 | Preferably | QSTKGG | 710 | | | | |
| | Key | QSTKG | 711 | | | | |
| P8 | Key | LLFEETLYQS | 712 | Wheat/rye/barley | 3 | LLFEETLYQS | 2889 |
| | Preferably | QSTKGG | 713 | Wheat/rye/barley | 3 | QSTKG | 2890 |
| | Key | QSTKG | 714 | | | | |
| P10 | Key | XXXXXXXXYXSTKGG | 715 | | | | |
| | Key | QSTK | 716 | | | | |
| P12 | Preferably | QSTKGG | 717 | | | | |
| | Key | QSTKG | 718 | | | | |
| P14 | Key | XXXXXXXXYXSXKXG | 719 | | | | |
| | Key | QSTKGG | 720 | | | | |
| P16 | Preferably | QSTKGG | 721 | | | | |
| | Key | QSTK | 722 | | | | |
| P17 | Key | QSTK | 723 | | | | |
| P19 | Key | LLFEETLY | 724 | | | | |
| | Key | QSTKG | 725 | | | | |
| P21 | Key | LLFEETLYQS | 726 | | | | |
| | More preferably | QSTKGG | 727 | | | | |
| | Preferably | QSTKG | 728 | | | | |
| | Key | QSTK | 729 | | | | |
| P22 | Preferably | XXXXXXXXYQSTKGG | 730 | | | | |
| | Key | XXXXXXXXYXSXKGG | 731 | | | | |
| | Key | VLLFEETLY | 732 | | | | |
| | Preferably | QSTKGG | 733 | | | | |
| | Key | QSTKG | 734 | | | | |
| P24 | Preferably | VLLFEETLY | 735 | | | | |
| | Key | LLFEETLY | 736 | | | | |
| | More preferably | QSTKGG | 737 | | | | |
| | Preferably | QSTKG | 738 | | | | |
| | Key | QSTK | 739 | | | | |
| P26 | Preferably | XXXXXXXLYXSTKGG | 740 | | | | |
| | Key | XXXXXXXXYXXTKGG | 741 | | | | |
| | More preferably | QSTKGG | 742 | | | | |
| | Preferably | XSTKGG | 743 | | | | |
| | Key | XXTKGG | 744 | | | | |
| | Key | QSTK | 745 | | | | |
| P27 | Preferably | QSTKG | 746 | | | | |
| | Key | QSTK | 747 | | | | |
| P29 | Preferably | QSTKGG | 748 | | | | |
| | Key | QSTKG | 749 | | | | |
| P30 | Preferably | QSTKGG | 750 | | | | |
| | Key | QSTKG | 751 | | | | |
| P31 | Preferably | QSTKGG | 752 | | | | |
| P32 | Key | QSTKG | 753 | | | | |
| | Key | XXXXXXXXYXSXKGX | 754 | | | | |
| | Key | LLFEETLYQS | 755 | | | | |
| | Preferably | QSTKGGK | 756 | | | | |
| | Key | QSTKGG | 757 | | | | |
| P33 | Key | VLLFEETLYQ | 758 | | | | |
| | Preferably | QSTKGG | 759 | | | | |
| | Key | QSTKG | 760 | | | | |
| P34 | Key | XIXFXXXXYXSTKGG | 761 | | | | |
| | Preferably | QSTKGG | 762 | | | | |
| | Key | XSTKGG | 763 | | | | |
| | Key | QSTKG | 764 | | | | |
| P35 | Key | QSTKGG | 765 | | | | |
| P36 | Key | XXXXXXXXYXXTKXG | 766 | | | | |
| | Preferably | QSTKGG | 767 | | | | |
| | Key | QSTKG | 768 | | | | |
| G1 | Key | XXXXXXXLYQSTKGG | 769 | | | | |
| | Preferably | QSTKG | 770 | Wheat/rye/barley | 4 | QSTK | 2891 |
| | Key | QSTK | 771 | | | | |
| G7 | Key | XXXXXXXXYXXTKGG | 772 | | | | |
| | Key | VLLFEETLYQ | 773 | | | | |
| | Preferably | QSTKG | 774 | | | | |
| | Key | QSTK | 775 | | | | |

E11
Spot No. 1,5,6,14

| | | | | Food in which | | | |
|---|---|---|---|---|---|---|---|
| | | | SEQ ID | cross-reactivity | Graph | | SEQ ID |
| Protein name | Alpha-gliadin (Fragment) A0A0E3Z522 | | NO | was confirmed | No. | Synthetic sequence | NO |
| 15-residue | QPYPQPQPFPSQQPY (positions 61-75 of SEQ | | 776 | | | | |
| sequences | ID NOs. 2, 10, 12 and 28) | | | | | | |
| P3 | Preferably | XXXXQPQPFPSQQXX | 777 | | | | |
| | Key | XXXXXXXPFPXQXXX | 778 | | | | |
| | Key | PQPQPFP | 779 | | | | |
| P4 | Preferably | QPYXXXXPXPSQXPY | 780 | | | | |
| | Key | XPYXXXXXXPXQXXY | 781 | | | | |
| | Preferably | PQPQPFPSQ | 782 | | | | |
| | Key | XXXXPXPSQ | 783 | | | | |
| | Preferably | PQPQPFP | 784 | | | | |
| | Key | QPFP | 785 | | | | |
| P5 | Preferably | XPYXQPXPFPSXXXX | 786 | | | | |
| | Key | XXXXQPXXXPSXXXX | 787 | | | | |
| | More preferably | QPQPFP | 788 | | | | |
| | Preferably | QPQPF | 789 | | | | |
| | Key | QPXPF | 790 | | | | |
| P7 | Preferably | XPYXQPXXFPSQXPY | 791 | | | | |
| | Key | XXYXQXXXXPSQXPY | 792 | | | | |
| | Further preferably | YPQPQPFPSQ | 793 | | | | |
| | More preferably | PQPQPFPSQ | 794 | | | | |
| | Preferably | XQPXXFPSQ | 795 | | | | |
| | Key | XQXXXXPSQ | 796 | | | | |
| | Most preferably | PQPFPSQQPY | 797 | | | | |
| | Further preferably | PFPSQQPYLQ | 798 | | | | |
| | More preferably | FPSQQPY | 799 | | | | |
| | Preferably | FPSQXPY | 800 | | | | |
| | Key | XPSQXPY | 801 | | | | |
| P8 | Preferably | QPYXXPQPFPSQQPY | 802 | | | | |
| | Key | XPYXXPQPFPSQQPY | 803 | | | | |
| | Preferably | PQPQPFP | 804 | | | | |
| | Key | XXPQPFP | 805 | Wheat/rye/barley | 3 | PQPQPFP | 2892 |
| P9 | Preferably | XPYXXXXXFPSQQXX | 806 | | | | |
| | Key | XXYXXXXXXPSQQXX | 807 | | | | |
| | Preferably | PQPQPFP | 808 | | | | |
| | Key | QPQPF | 809 | | | | |
| P10 | Key | XXYXXXQPXPXQQXX | 810 | | | | |
| | Key | PQPQPFP | 811 | | | | |
| P12 | Preferably | QPYPQPQPXPSQQPY | 812 | | | | |
| | Key | XXYXXXQPXPSQQXY | 813 | | | | |
| | Further preferably | PQPQPFPSQ | 814 | | | | |
| | More preferably | QPQPFPS | 815 | | | | |
| | Preferably | QPQPXPS | 816 | | | | |
| | Key | XXQPXPS | 817 | | | | |
| P14 | Key | XXYXQXXXXPSQQXY | 818 | | | | |
| | Key | QPFPSQ | 819 | | | | |
| P15 | Preferably | XPYXQPQPXPSQQXY | 820 | | | | |
| | Key | XXXXXXXPXPSQQXY | 821 | | | | |
| | Further preferably | YPQPQPFPSQ | 822 | | | | |
| | More preferably | PQPQPFPSQ | 823 | | | | |
| | Preferably | XQPQPXPSQ | 824 | | | | |
| | Key | XXXXPXPSQ | 825 | | | | |
| P19 | Key | XXYXXXXXXPSQQXX | 826 | | | | |
| | Key | YPQPQPFP | 827 | | | | |
| | Preferably | QPFPSQQPYL | 828 | | | | |
| | Key | XXXPSQQXXL | 829 | | | | |
| P21 | Preferably | QPYXQXQPXPSQQXX | 830 | | | | |
| | Key | XXYXXXQXXPSQQXX | 831 | | | | |
| | Preferably | PQPQPFP | 832 | | | | |
| | Key | QPQPF | 833 | | | | |
| P22 | Key | XPXXQPQXFPXQQXX | 834 | | | | |
| P24 | Preferably | XPYXXPQPFPSQXXX | 835 | | | | |
| | Key | XXYXXXQPXPSXXXX | 836 | | | | |
| | Further preferably | PQPQPFPS | 837 | | | | |
| | More preferably | QPQPFPS | 838 | | | | |
| | Preferably | XPQPFPS | 839 | | | | |
| | Key | XXQPXPS | 840 | | | | |
| | Key | PQPF | 841 | | | | |
| P26 | Preferably | XXYXXXXPXPSQQPY | 842 | | | | |
| | Key | XXYXXXXXXPSQQXY | 843 | | | | |
| | Preferably | PQPQPFP | 844 | | | | |
| | Key | PQPQPF | 845 | | | | |
| P27 | Preferably | QPYXQPQPFPSQQPY | 846 | | | | |
| | Key | XPYXQPQPFPSQQPY | 847 | | | | |
| | Key | QPFPS | 848 | | | | |
| P28 | Preferably | QPYXXPQPFPXQQXY | 849 | | | | |
| | Key | QPYXXXXPXPXQQXX | 850 | | | | |
| | More preferably | PQPQPFP | 851 | | | | |
| | Preferably | QPQPFP | 852 | | | | |
| | Key | XPQPFP | 853 | | | | |
| P29 | Preferably | XPYXQPQPFPSXQPY | 854 | | | | |
| | Key | XXYXQPQPFPSXQPY | 855 | | | | |
| | More preferably | YPQPQPFPS | 856 | | | | |
| | Preferably | PQPQPFP | 857 | | | | |
| | Key | XQPQPFP | 858 | | | | |
| P30 | Preferably | XPYXQPQPFPSQQPY | 859 | | | | |
| | Key | XXYXXXXPFPXQQPY | 860 | | | | |
| | More preferably | YPQPQPFPS | 861 | | | | |
| | Preferably | PQPQPFP | 862 | | | | |
| | Key | XQPQPFP | 863 | | | | |
| P32 | Preferably | XXYXXPQPFPSQQXY | 864 | | | | |
| | Key | XXXXXXXXXPXQQXY | 865 | | | | |
| | More preferably | QPQPFPSQ | 866 | | | | |
| | Preferably | QPQPF | 867 | | | | |
| | Key | XPQPF | 868 | | | | |
| P33 | Key | XPYXXPQPXXSQQXX | 869 | | | | |
| | Key | PQPQPF | 870 | | | | |
| P34 | Preferably | QPXPQPQPFPXQQPY | 871 | | | | |
| | Key | QPXXXPQPFPXQQPY | 872 | | | | |
| | Preferably | PYPQPQPFP | 873 | | | | |
| | Key | PXXXPQPFP | 874 | | | | |
| | Key | PQPQP | 875 | | | | |
| P35 | Key | XXYXXPXPFPSQQXY | 876 | | | | |
| | Preferably | YPQPQPFPSQ | 877 | | | | |
| | Key | YXXPXPFPSQ | 878 | | | | |
| | Preferably | QPFPSQQP | 879 | | | | |
| | Key | XPFPSQQX | 880 | | | | |
| P50 | Key | XXYXXXQPFPSQQPX | 881 | | | | |
| | Key | QPQP | 882 | | | | |
| P52 | Preferably | QXYXQPXPFXXXXXX | 883 | | | | |
| | Key | XXXXQPXPFXXXXXX | 884 | | | | |
| | Key | PQPFPS | 885 | | | | |
| G6 | Preferably | XPYXXPQPFPSQXXX | 886 | | | | |
| | Key | XPYXXPQPFPXXXXX | 887 | | | | |
| | Preferably | PQPQPFP | 888 | | | | |
| | Key | XXPQPFP | 889 | | | | |
| G7 | Preferably | QPYPQPQPFPSXQPX | 890 | | | | |
| | Key | XPYPQPXPFPSXQXX | 891 | | | | |
| | Key | YPQP | 892 | | | | |
| G9 | Preferably | XXYXXPXXFXXQQPY | 893 | | | | |
| | Key | XXXXXXXXXXXQQPY | 894 | | | | |
| | Preferably | PQPQPFP | 895 | | | | |
| | Key | PQPQPF | 896 | | | | |
| | Preferably | PSQQPY | 897 | | | | |
| | Key | XXQQPY | 898 | | | | |

E12
Spot No. 8

| | | | | Food in which | | | |
|---|---|---|---|---|---|---|---|
| | | | SEQ ID | cross-reactivity | Graph | | SEQ ID |
| Protein name | Alpha/beta-gliadin I0IT53 | | NO | was confirmed | No. | Synthetic sequence | NO |
| 15-residue | LGQQQQQFPGQQQPF (positions 51-65 of | | 899 | | | | |
| sequences | SEQ ID NO: 16) | | | | | | |
| P2 | Key | XXXXQQQXXXQQQXX | 900 | | | | |
| | Key | LGQQQQQFPG | 901 | | | | |
| | Preferably | QQQQFPGQQQ | 902 | | | | |
| | Key | XQQQXXXQQQ | 903 | | | | |
| | Preferably | QQFPGQQQPF | 904 | | | | |
| | Key | QQXXXQQQXX | 905 | | | | |
| P7 | Key | XXQQQQQXXXXQXXX | 906 | | | | |
| | More preferably | QQQQQFPGQQ | 907 | | | | |
| | Preferably | QQQQFPGQ | 908 | | | | |
| | Key | QQQQXXXX | 909 | | | | |
| | Preferably | QQFPGQQQPF | 910 | | | | |
| | Key | QFPG | 911 | | | | |
| P8 | Key | XXQQQXQXPXXQXXX | 912 | | | | |
| | Preferably | QQFLGQQQQ | 913 | | | | |
| | Key | QQFXXQQQX | 914 | Wheat/rye | 3 | QQFPGQQQP | 2893 |
| | Preferably | QQQFPGQQQ | 915 | | | | |
| | Key | QXQXPXXQX | 916 | | | | |
| | Key | QQFPG | 917 | Wheat/rye | 3 | QQFPG | 2895 |
| P10 | Key | LXQQQXXXXXXXXXX | 918 | | | | |
| | Key | LGQQQQQFPG | 919 | | | | |
| | Key | QQQQQFPGQQ | 920 | | | | |
| | Key | QQFPGQQQPF | 921 | | | | |
| P12 | Key | XXXQQQQXXXXQXXX | 922 | | | | |
| | Preferably | LGQQQQQFPG | 923 | | | | |
| | Key | XXXQQQQXXX | 924 | | | | |
| | Preferably | QQFPGQQQ | 925 | | | | |
| | Key | FPGQQ | 926 | | | | |
| P14 | Preferably | XXQQQQQXXXQQXXX | 927 | | | | |
| | Key | XXXXQQQXXXXQXXX | 928 | | | | |
| | Preferably | QQFPGQQQ | 929 | | | | |
| | Key | QQFPGQQ | 930 | | | | |
| P19 | Preferably | XXQQQQQXXXXQQXX | 931 | | | | |
| | Key | XXXXQQQXXXXQQXX | 932 | | | | |
| | More preferably | QQQFPGQQQP | 933 | | | | |
| | Preferably | QQFPGQQQ | 934 | | | | |
| | Key | QQXXXXQQ | 935 | | | | |
| P21 | Key | LXXXQQXXXXXQXXX | 936 | | | | |
| | Key | LGQQQQQFPG | 937 | | | | |
| | More preferably | QQQFPGQQQ | 938 | | | | |
| | Preferably | QQFPGQQQ | 939 | | | | |
| | Key | QQFPGQQ | 940 | | | | |
| P22 | Preferably | LXQQQQQXXXXQQXX | 941 | | | | |
| | Key | XXXQQXQXXXXQXXX | 942 | | | | |
| | More preferably | QQQQFPGQQQ | 943 | | | | |
| | Preferably | QQQQFPG | 944 | | | | |
| | Key | QQQQXXX | 945 | | | | |
| | Preferably | QQFPGQQQPF | 946 | | | | |
| | Key | QFPGQQQPF | 947 | | | | |
| P24 | Key | XXXQQXQXXXQQXXX | 948 | | | | |
| | Preferably | QFPGQQQPF | 949 | | | | |
| | Key | QFPGQQQ | 950 | | | | |
| P26 | Preferably | QQFPGQQ | 951 | | | | |
| | Key | QQFPG | 952 | | | | |
| P28 | More preferably | XXXXXQXFPGQQQXX | 953 | | | | |
| | Preferably | XXXXXQXXPGQXQXX | 954 | | | | |
| | Key | XXXXXQXXPGQXXXX | 955 | | | | |
| | Further preferably | QQFPGQQQ | 956 | | | | |
| | More preferably | QXFPGQQQ | 957 | | | | |
| | Preferably | QXXPGQXQ | 958 | | | | |
| | Key | QXXPGQXX | 959 | | | | |
| P32 | Key | LGQQQQ | 960 | | | | |
| | Preferably | QQQFPGQQ | 961 | | | | |
| | Key | FPGQQ | 962 | | | | |
| P33 | Key | XXQXQQQXXXXXXXX | 963 | | | | |
| | More preferably | QQQQFPGQQQ | 964 | | | | |
| | Preferably | QQQFPGQQQ | 965 | | | | |
| | Key | QQFPGQQ | 966 | | | | |
| P50 | Key | LGXQQQQFPGXXXXX | 967 | | | | |
| | More preferably | QQQQFPGQQQ | 968 | | | | |
| | Preferably | QQQFP | 969 | | | | |
| | Key | QQQFX | 970 | | | | |
| P54 | Preferably | XGQXQQQFXXXXXXX | 971 | | | | |
| | Key | XXQXQQQFXXXXXXX | 972 | | | | |
| | Key | QQQQ | 973 | | | | |

E13
Spot No. 2

| | | | | Food in which | | | |
|---|---|---|---|---|---|---|---|
| | | | SEQ ID | cross-reactivity | Graph | | SEQ ID |
| Protein name | LMW-m glutenin subunit 8 V9P767 | | NO | was confirmed | No. | Synthetic sequence | NO |
| 15-residue | QPFPQQQQPIILLQQ (positions 51-65 of SEQ | | 974 | | | | |
| sequences | ID NO: 4) | | | | | | |
| P7 | Key | QPFPQQQQP | 975 | | | | |
| | Key | IILLQ | 976 | | | | |
| P12 | Key | QPFPQQQ | 977 | | | | |
| | Key | FPQQQQPIII | 978 | | | | |
| | Key | IILLQ | 979 | | | | |
| P14 | Preferably | QPFPQQ | 980 | | | | |
| | Key | PFPQ | 981 | | | | |
| | Key | IILLQ | 982 | | | | |
| P15 | Key | XXXXXQXQPIILLXX | 983 | | | | |
| | Preferably | QPFPQQQQ | 984 | | | | |
| | Key | QPFPQQQ | 985 | | | | |
| | Preferably | IILLQ | 986 | | | | |
| | Key | IILLX | 987 | | | | |
| P21 | Key | QPFPQQ | 988 | | | | |
| | Key | IILLQ | 989 | | | | |
| P22 | Key | QXXXQQQXXXIXLXQ | 990 | | | | |
| P24 | Preferably | XXXXXQXXXIILLXX | 991 | | | | |
| | Key | XXXXXXXXXIILLXX | 992 | | | | |
| | More preferably | QQQQPIILLQ | 993 | | | | |
| | Preferably | XQXXXIILLX | 994 | | | | |
| | Key | XXXXXIILLX | 995 | | | | |
| P26 | Preferably | QPFPQQQ | 996 | | | | |
| | Key | PFPQQQ | 997 | | | | |
| | Key | IILLQ | 998 | | | | |
| P27 | Key | QQQQPITILQ | 999 | | | | |
| P28 | Key | QPFPQQQQPI | 1000 | | | | |
| | Preferably | PIILLQ | 1001 | | | | |
| | Key | IILLQ | 1002 | | | | |
| P32 | Key | QPFPQQ | 1003 | | | | |
| | Key | QQQQPITILQ | 1004 | | | | |
| P33 | Key | QPFPQQQ | 1005 | | | | |
| | Key | IILLQQSP | 1006 | | | | |
| P55 | More preferably | QXFPQQQQPILLLXX | 1007 | | | | |
| | Preferably | XXXPQQQQXIILLXX | 1008 | | | | |
| | Key | XXXXXQXXXIILLXX | 1009 | | | | |

E14
Spot No. 3

| | | | | Food in which | | | |
|---|---|---|---|---|---|---|---|
| | | | SEQ ID | cross-reactivity | Graph | | SEQ ID |
| Protein name | Gamma-gliadin P08453 | | NO | was confirmed | No. | Synthetic sequence | NO |
| 15-residue | WLQQQLVPQLQQPLS (positions 31-45 of | | 1010 | | | | |
| sequences | SEQ ID NO: 6) | | | | | | |
| P3 | More preferably | WXQQQLXPQLQXPXX | 1011 | | | | |
| | Preferably | XXXQQLXPQLQXXXX | 1012 | | | | |
| | Key | XXXQQLXPQLXXXXX | 1013 | | | | |
| | Further preferably | QLVPQLQQPL | 1014 | | | | |
| | More preferably | QLXPQLQXPX | 1015 | | | | |
| | Preferably | QLXPQLQXXX | 1016 | | | | |
| | Key | QLXPQLXXXX | 1017 | | | | |
| P4 | Preferably | WLQQQLVPQLQXPLS | 1018 | | | | |
| | Key | XLQQQLVPQLQXPXS | 1019 | | | | |
| | Preferably | QLVPQLQXPL | 1020 | | | | |
| | Key | QLVPQLQXPX | 1021 | | | | |
| P5 | More preferably | XXXXQXXPQLQXXXS | 1022 | | | | |
| | Preferably | XXXXQXXPQLQXXXX | 1023 | | | | |
| | Key | XXXXQXXPXLQXXXX | 1024 | | | | |
| | Further preferably | QLVPQLQQ | 1025 | | | | |
| | More preferably | QLVPQLQ | 1026 | | | | |
| | Preferably | LVPQLQ | 1027 | | | | |
| | Key | XXPQLQ | 1028 | | | | |
| P7 | More preferably | XXXXQXXPXLQXPLS | 1029 | | | | |
| | Preferably | XXXXQXXPXLXXPLX | 1030 | | | | |
| | Key | XXXXXXXPXLXXPLX | 1031 | | | | |
| | Preferably | QLVPQLQQ | 1032 | | | | |
| | Key | QXXPXLQX | 1033 | | | | |
| P8 | More preferably | XXXXQXVPQLQXPXS | 1034 | | | | |
| | Preferably | XXXXQXVPQLQXXXX | 1035 | | | | |
| | Key | XXXXQXXPXLQXXXX | 1036 | | | | |
| | More preferably | QLVPQLQ | 1037 | | | | |
| | Preferably | QXVPQLQ | 1038 | | | | |
| | Key | QXXPXLQ | 1039 | Wheat | 2 | QLVPQLQ | 2896 |
| | | | | Rye | | QPYPQLQ | 2897 |
| | | | | Barley | | QQPPFLQ | 2898 |
| | | | | Orchard grass | | QDMPYLQ | 2899 |
| P10 | Preferably | XXQQQXVXXLQQPLS | 1040 | | | | |
| | Key | XXXXXXVXXLQXXLS | 1041 | | | | |
| | Further preferably | LVPQLQQPL | 1042 | | | | |
| | More preferably | VPQLQQPL | 1043 | | | | |
| | Preferably | VXXLQQPL | 1044 | | | | |
| | Key | VXXLQXXL | 1045 | | | | |
| | Key | LQQPL | 1046 | | | | |
| P12 | Preferably | XXXQQXXXQLQQXLS | 1047 | | | | |
| | Key | XXXXXXXXQLQQXLS | 1048 | | | | |
| | More preferably | LVPQLQQPL | 1049 | | | | |
| | Preferably | LQQPL | 1050 | | | | |
| | Key | LQQXL | 1051 | | | | |
| P15 | More preferably | WLQXQXXXXLXXPLS | 1052 | | | | |
| | Preferably | WLXXQXXXXLXXPLS | 1053 | | | | |
| | Key | WLXXQXXXXXXXXLS | 1054 | | | | |
| | Preferably | LVPQLQQPL | 1055 | | | | |
| | Key | VPQLQQPL | 1056 | | | | |
| P17 | More preferably | XLXQQXVPXXXXPLS | 1057 | | | | |
| | Preferably | XLXXQXVPXXXXPXS | 1058 | | | | |
| | Key | XXXXQXVPXXXXPXS | 1059 | | | | |
| | More preferably | LQQQLVPQ | 1060 | | | | |
| | Preferably | LXQQXVPX | 1061 | | | | |
| | Key | LXXQXVPX | 1062 | | | | |
| | Key | LQQPL | 1063 | | | | |
| P21 | More preferably | QLVPQLQQ | 1064 | | | | |
| | Preferably | QLVPQLQ | 1065 | | | | |
| | Key | XXXPQLQ | 1066 | | | | |
| P24 | Key | XXXQQXVPQLQXPXS | 1067 | | | | |
| | Further preferably | QLVPQLQQ | 1068 | | | | |
| | More preferably | QLVPQLQ | 1069 | | | | |
| | Preferably | QXVPQLQ | 1070 | | | | |
| | Key | QXVPXLQ | 1071 | | | | |
| P31 | More preferably | XLXXQLVPXLQXPXS | 1072 | | | | |
| | Preferably | XLXXQXVPXLQXXXS | 1073 | | | | |
| | Key | XXXXQXVPXLQXXXX | 1074 | | | | |
| | Fulther preferably | QLVPQLQQPL | 1075 | | | | |
| | More preferably | LVPQLQQPL | 1076 | | | | |
| | Preferably | LVPXLQXPX | 1077 | | | | |
| | Key | XVPXLQXXX | 1078 | | | | |
| P33 | Key | LQQPL | 1079 | | | | |
| P35 | Fulther preferably | QLVPQLQ | 1080 | | | | |
| | More preferably | QXVPQLQ | 1081 | | | | |
| | Preferably | QXVPXLQ | 1082 | | | | |
| | Key | QXXPXLQ | 1083 | | | | |
| P36 | More preferably | WLXXQXXXXLQXPLS | 1084 | | | | |
| | Preferably | XLXXQXXXXLXXPLS | 1085 | | | | |
| | Key | XXXXXXXXXLXXPLS | 1086 | | | | |
| | Preferably | LQQPL | 1087 | | | | |
| | Key | LQXPL | 1088 | | | | |

E15
Spot No. 4

| | | | | Food in which | | | |
|---|---|---|---|---|---|---|---|
| | | | SEQ ID | cross-reactivity | Graph | | SEQ ID |
| Protein name | Fructose-bisphosphate aldolase W5CCA9 | | NO | was confirmed | No. | Synthetic sequence | NO |
| 15-residue | STKGGKPFVDILKAG (positions 73-87 of | | 1089 | | | | |
| sequences | SEQ ID NO: 8) | | | | | | |
| P2 | Preferably | STKGGKPF | 1090 | | | | |
| | Key | STKGGK | 1091 | | | | |
| P9 | Preferably | STKGGKXFVXXLKXX | 1092 | | | | |
| | Key | XXKGXKXFXXXXXXX | 1093 | | | | |
| P10 | Key | STKGXKXXXXXXXXX | 1094 | | | | |
| P12 | Preferably | XXKGGKPFVDILKAX | 1095 | | | | |
| | Key | XXXXGKXFVDXLKXX | 1096 | | | | |
| P14 | More preferably | XTKGXKPFXXXLKAX | 1097 | | | | |
| | Preferably | XTKGXKPFXXXLXXX | 1098 | | | | |
| | Key | XXKXXKPXXXXLXXX | 1099 | | | | |
| P16 | Key | STKGGKXXXDXLXXG | 1100 | | | | |
| | Key | KGGK | 1101 | | | | |
| | Key | KPFVDLLKA | 1102 | | | | |
| P17 | More preferably | XTKGGKXFVXXLKXX | 1103 | | | | |
| | Preferably | XXKGGKXFXXXXKXX | 1104 | | | | |
| | Key | XXKGGKXFXXXXKXX | 1105 | | | | |
| P18 | | | | | | | |
| P19 | Preferably | SXKGXXPFVDILKAG | 1106 | | | | |
| | Key | XXKXXXPFVDILKAG | 1107 | | | | |
| | Key | KGGK | 1108 | | | | |
| P21 | More preferably | STKGGXXXXXILKAG | 1109 | | | | |
| | Preferably | XTKGXXXXXXXLKAG | 1110 | | | | |
| | Key | XTKGXXXXXXXXKXX | 1111 | | | | |
| | Key | STKGGK | 1112 | | | | |
| | More preferably | KGGKPFVDLL | 1113 | | | | |
| | Preferably | KGGXXXXXIL | 1114 | | | | |
| | Key | KGGXXXXXXL | 1115 | | | | |
| P22 | More preferably | STKGXKPFVDIXKAG | 1116 | | | | |
| | Preferably | STKGXKPFVDIXKAX | 1117 | | | | |
| | Key | STKGXKPFVDXXKAX | 1118 | | | | |
| | Preferably | TKGGK | 1119 | | | | |
| | Key | TKGXK | 1120 | | | | |
| | Further preferably | GGKPFVDILK | 1121 | | | | |
| | More preferably | GKPFVDLLK | 1122 | | | | |
| | Preferably | XKPFVDIXK | 1123 | | | | |
| | Key | XKPFVDXXK | 1124 | | | | |
| P24 | Key | STKXXXXFXXXXXXX | 1125 | | | | |
| | Preferably | TKGGK | 1126 | | | | |
| P26 | Key | XTKGGKPFVDILKXX | 1127 | | | | |
| P32 | More preferably | XXKGGKPFVXILKAX | 1128 | | | | |
| | Preferably | XXKXXKXFXXXLKAX | 1129 | | | | |
| | Key | XXXXXKXFXXXLKAX | 1130 | | | | |
| | Preferably | KPFVDI | 1131 | | | | |
| | Key | KPFVXI | 1132 | | | | |
| P33 | Key | XXKGXKXFVDXLXXG | 1133 | | | | |
| P34 | Key | STKGGKP | 1134 | | | | |
| | Key | KGGKPFVDLL | 1135 | | | | |
| | Key | GKPFVDLLKA | 1136 | | | | |
| P35 | | | | | | | |
| G1 | Key | XXXXGXXFXDXLXXX | 1137 | | | | |
| G3 | Preferably | STKGGXXXVDXLXXX | 1138 | | | | |
| | Key | XXKGGXXXVDXXXXX | 1139 | | | | |
| | Key | KGGK | 1140 | | | | |
| G7 | Key | GGKPFVD | 1141 | | | | |

E16
Spot No. 4

| | | | | Food in which | | | |
|---|---|---|---|---|---|---|---|
| | | | SEQ ID | cross-reactivity | Graph | | SEQ ID |
| Protein name | Fructose-bisphosphate aldolase W5CCA9 | | NO | was confirmed | No. | Synthetic sequence | NO |
| 15-residue | TEPSQLSLDQNAQGL (positions 143-157 of | | 1142 | | | | |
| sequences | SEQ ID NO: 8) | | | | | | |
| P21 | Preferably | XXXXQLXLDQNXXXX | 1143 | | | | |
| | Key | XXXXQXXXDQNXXXX | 1144 | Wheat/rye/barley/ | 2 | TEPSQLSIDQNAQGL | 1142 |
| | | | | timothy | | NEPSQLSLDQNAQGL | 2900 |
| | More preferably | QLSIDQN | 1145 | | | | |
| | Preferably | QLXLDQN | 1146 | | | | |
| | Key | QXXXDQN | 1147 | | | | |
| P33 | Key | TEXXXLSIDQNXXXX | 1148 | | | | |
| | Key | PSQL | 1149 | | | | |
| P35 | Key | TEPSQLSIDQ | 1150 | | | | |
| | Key | SQLSIDQNA | 1151 | | | | |
| | Key | LSIDQNAQGL | 1152 | | | | |
| G1 | Key | TEPSQLSIDQNXXXX | 1153 | | | | |
| | Key | QGLAR | 1154 | | | | |
| G5 | Key | TEPXQXSLDQXXXXX | 1155 | | | | |
| | More preferably | TEPSQLSIDQ | 1156 | | | | |
| | Preferably | TEPSQL | 1157 | | | | |
| | Key | TEPXQX | 1158 | | | | |
| G7 | More preferably | TEPSQLSIDXNAXGL | 1159 | | | | |
| | Preferably | TEPSQLSXDXNAXGL | 1160 | | | | |
| | Key | TXPXQLSXDXNAXXL | 1161 | | | | |
| | Further preferably | SIDQNAQG | 1162 | | | | |
| | More preferably | SLDXNAXG | 1163 | | | | |
| | Preferably | SXDXNAXG | 1164 | | | | |
| | Key | SXDXNAXX | 1165 | | | | |

E17
Spot No. 5

| | | | | Food in which | | | |
|---|---|---|---|---|---|---|---|
| | | | SEQ ID | cross-reactivity | Graph | | SEQ ID |
| Protein name | Alpha-gliadin Gli2-LM2-12 Q1WA40 | | NO | was confirmed | No. | Synthetic sequence | NO |
| 15-residue | PGQQQQFPPQQPYPQ (positions 51-65 of | | 1166 | | | | |
| sequences | SEQ ID NO: 10) | | | | | | |
| P3 | Key | PXQQQXXXXXXXXXQ | 1167 | | | | |
| | Preferably | PGQQQQFPPQ | 1168 | | | | |
| | Key | PXQQQXXXXX | 1169 | | | | |
| | Key | FPPQQP | 1170 | | | | |
| P7 | Preferably | PXQXQXXXXQQXYPX | 1171 | | | | |
| | Key | PXXXQXXXXXQXYXX | 1172 | | | | |
| | Preferably | QQQQFPPQQP | 1173 | | | | |
| | Key | QXQXXXXQQX | 1174 | | | | |
| P8 | More preferably | QQQFPPQQP | 1175 | | | | |
| | Preferably | QQFPPQQ | 1176 | | | | |
| | Key | QQFPPQ | 1177 | | | | |
| P9 | Key | XXQQQXXPXXXXXXX | 1178 | | | | |
| P12 | Preferably | QQFPPQQ | 1179 | | | | |
| | Key | QQFPP | 1180 | | | | |
| P14 | Preferably | PGQQQXXXXQQXXXX | 1181 | | | | |
| | Key | XXQQQXXXXXQXXXX | 1182 | | | | |
| | Key | QQFPPQQ | 1183 | | | | |
| P19 | Key | XXXQQXXXXXQPXXX | 1184 | | | | |
| | Key | QQFPPQQP | 1185 | | | | |
| P21 | Key | PXXQQQXXXXQXXXX | 1186 | | | | |
| | More preferably | QQQQFPPQQ | 1187 | | | | |
| | Preferably | QQFPPQQ | 1188 | | | | |
| | Key | QQFPPQ | 1189 | | | | |
| | Key | QQFPPQQPYP | 1190 | | | | |
| P22 | More preferably | PGXQQXXXXQXPYXX | 1191 | | | | |
| | Preferably | PGXQQXXXXQXXYXX | 1192 | | | | |
| | Key | PGXQQXXXXXXXYXX | 1193 | | | | |
| | Key | QQQQFPPQ | 1194 | | | | |
| | Key | QFPPQQPYPQ | 1195 | | | | |
| P26 | Preferably | PGQQQXXXXXXXXXX | 1196 | | | | |
| | Key | PXQQQXXXXXXXXXX | 1197 | | | | |
| P28 | Preferably | PGQQQQXPPQQPYPQ | 1198 | | | | |
| | Key | PGQQQQXXPQQPYPQ | 1199 | | | | |
| | Key | QQFPGQQQQ | 1200 | | | | |
| P31 | Preferably | PGQQQQXXXQXXXXX | 1201 | | | | |
| | Key | PGQXQXXXXXXXXXX | 1202 | | | | |
| P34 | Preferably | PGXXQXXPPXXXXXQ | 1203 | | | | |
| | Key | XGXXQXXPPXXXXXQ | 1204 | | | | |
| | More preferably | QQQQFPPQQP | 1205 | | | | |
| | Preferably | QQFPPQQP | 1206 | | | | |
| | Key | FPPQQ | 1207 | | | | |
| P35 | Key | QQFPPQQ | 1208 | | | | |

E18
Spot No. 9

| | | | | Food in which | | | |
|---|---|---|---|---|---|---|---|
| | | | SEQ ID | cross-reactivity | Graph | | SEQ ID |
| Protein name | LMW-D8(LMW-GS) B2BZD1 | | NO | was confirmed | No. | Synthetic sequence | NO |
| 15-residue | PIQQQPQPFPQQPPC (positions 51-65 of | | 1209 | | | | |
| sequences | SEQ ID NO: 18) | | | | | | |
| P2 | Preferably | PIQQQP | 1210 | | | | |
| | Key | PIQQXX | 1211 | | | | |
| P7 | Key | XXXXXPQXFPQQXPX | 1212 | | | | |
| | Preferably | PIQQQPQPFP | 1213 | | | | |
| | Key | XXXXXPQXFP | 1214 | | | | |
| | More preferably | PQQPPC | 1215 | | | | |
| | Preferably | PQQPP | 1216 | | | | |
| | Key | PQQXP | 1217 | | | | |
| P9 | Preferably | PIQQQP | 1218 | | | | |
| | Key | PIQQXX | 1219 | | | | |
| | Key | IQQQP | 1220 | | | | |
| P10 | Preferably | PIQQQPQPF | 1221 | | | | |
| | Key | PIQQXXXXX | 1222 | | | | |
| | Key | IQQQP | 1223 | | | | |
| P12 | More preferably | PIQQQPQPFP | 1224 | | | | |
| | Preferably | QQPIQQQP | 1225 | | | | |
| | Key | PIQQQP | 1226 | | | | |
| | Key | PQQPPC | 1227 | | | | |
| P13 | More preferably | PIQQQPQPFP | 1228 | | | | |
| | Preferably | PIQQQP | 1229 | | | | |
| | Key | PIQQXX | 1230 | | | | |
| | Key | PQQPP | 1231 | | | | |
| P14 | Preferably | XIQXXXXXXPQQXXX | 1232 | | | | |
| | Key | XIXXXXXXXPQQXXX | 1233 | | | | |
| | Key | PQQPP | 1234 | | | | |
| P17 | Key | PQQPP | 1235 | | | | |
| P21 | Key | PQQPP | 1236 | | | | |
| P24 | Preferably | PXQQQPQPFPQQPPC | 1237 | | | | |
| | Key | PXQQQPQPFPQXPPC | 1238 | | | | |
| | Preferably | QQQPIQQQP | 1239 | | | | |
| | Key | QQQPXQQQP | 1240 | | | | |
| P26 | Key | PIQQQP | 1241 | | | | |
| | Preferably | PQQPPC | 1242 | | | | |
| | Key | PQQPP | 1243 | | | | |
| P31 | Key | PIQQQP | 1244 | | | | |
| | Preferably | PQQPPC | 1245 | | | | |
| | Key | PQQPP | 1246 | | | | |
| P32 | Key | PIQQQP | 1247 | | | | |
| | Key | PQQPP | 1248 | | | | |
| P33 | Key | QQPIQQQP | 1249 | | | | |
| | Key | PQQPP | 1250 | | | | |
| P35 | Key | XXXXXXQPFPXXXXX | 1251 | | | | |
| | Key | PQQPP | 1252 | | | | |
| P36 | Preferably | PIQQQPQPFP | 1253 | | | | |
| | Key | PIQQQP | 1254 | | | | |
| | Preferably | PQQPPC | 1255 | | | | |
| | Key | PQQPP | 1256 | | | | |

E19
Spot No. 7

| | | | | Food in which | | | |
|---|---|---|---|---|---|---|---|
| | | | SEQ ID | cross-reactivity | Graph | | SEQ ID |
| Protein name | Gamma gliadin-A1 M9TG60 | | NO | was confirmed | No. | Synthetic sequence | NO |
| 15-residue | SSLVSMLLPRSDCKV (positions 211-225 of | | 1257 | | | | |
| sequences | SEQ ID NO: 14) | | | | | | |
| P2 | Key | XXXXXXIXPXSDCKV | 1258 | | | | |
| | Key | LPRS | 1259 | | | | |
| P8 | Preferably | XXXVSMILPRSDCKV | 1260 | | | | |
| | Key | XXXXSMILPRSDXKV | 1261 | | | | |
| P9 | Preferably | XXXVSMILXRSDCKV | 1262 | | | | |
| | Key | XXXVSXLLXXXXXKV | 1263 | | | | |
| P16 | More preferably | XXLVSMILPRSDCKV | 1264 | | | | |
| | Preferably | XXXXXMILPRSDCKV | 1265 | | | | |
| | Key | XXXXXXIXPRSDXKV | 1266 | | | | |
| P20 | Preferably | XXLVSMILPRSDCKV | 1267 | | | | |
| | Key | XXXXSMILPRSDCKV | 1268 | | | | |
| | Key | LPRS | 1269 | | | | |
| P21 | Preferably | XXXVSMILPRSDCKV | 1270 | | | | |
| | Key | XXXXSXLLPRSXCKV | 1271 | | | | |
| P26 | More preferably | XXLVSMILPRSDCKV | 1272 | | | | |
| | Preferably | XXXVSMILPRSDCKV | 1273 | | | | |
| | Key | XXXXSMILPRSDCKV | 1274 | | | | |
| P29 | Preferably | XXXVSMILPRSDCKV | 1275 | | | | |
| | Key | XXXXSMILXRXDCKV | 1276 | | | | |
| | Key | LPRS | 1277 | | | | |
| P30 | Preferably | XXXVSMILPRSDCKV | 1278 | | | | |
| | Key | XXXXSMILPRSDCKV | 1279 | | | | |
| P33 | Preferably | XXXVSMILPRSDCKV | 1280 | | | | |
| | Key | XXXXSMILXRSDCKV | 1281 | | | | |
| | Key | LPRS | 1282 | | | | |
| P34 | Preferably | XXLVSXLLXXSDCKV | 1283 | | | | |
| | Key | XXXVSXIXXXSDCKV | 1284 | | | | |
| P50 | Preferably | XXLXXMLLXXSDXXX | 1285 | | | | |
| | Key | XXLXXMLLXXXDXXX | 1286 | | | | |
| | Key | LLPRS | 1287 | | | | |
| P52 | Key | LPRS | 1288 | | | | |
| P53 | Preferably | XXXVXXILXRXDXKV | 1289 | | | | |
| | Key | XXXXXXILXRXDXXX | 1290 | | | | |
| | Key | LPRS | 1291 | | | | |
| G6 | More preferably | XXLVSMILXXSDCKV | 1292 | | | | |
| | Preferably | XXXVSMILXXSDCKV | 1293 | | | | |
| | Key | XXXVSXLLXXXXXXX | 1294 | | | | |
| G7 | Key | VSMLLPRSD | 1295 | | | | |
| | Key | LLPRSDCKV | 1296 | | | | |

E20
Spot No. 4

| | | | | Food in which | | | |
|---|---|---|---|---|---|---|---|
| | | | SEQ ID | cross-reactivity | Graph | | SEQ ID |
| Protein name | Fructose-b sphosphate aldolase W5CCA9 | | NO | was confirmed | No. | Synthetic sequence | NO |
| 15-residue | SINVENVEDNRRALR (positions 33-47 of | | 1297 | | | | |
| sequences | SEQ ID NO: 8) | | | | | | |
| P2 | Preferably | SLNVENVEXNRRAXR | 1298 | | | | |
| | Key | SLNVENVEXNRRAXX | 1299 | | | | |
| | Preferably | SLNVENVED | 1300 | | | | |
| | Key | SLNVEN | 1301 | | | | |
| P3 | Key | XXXXENXEDXRXXXX | 1302 | | | | |
| | Preferably | INVEN | 1303 | | | | |
| | Key | NVEN | 1304 | | | | |
| | Key | NRRALR | 1305 | | | | |
| P8 | Key | SXNVXXXEDNRRXXX | 1306 | | | | |
| | Key | NVEN | 1307 | | | | |
| P9 | Key | SLNXEXXEXNRXXXX | 1308 | | | | |
| P10 | Preferably | XXNVENXEDNRXXXX | 1309 | | | | |
| | Key | XXXXXXXEDNRXXXX | 1310 | | | | |
| | Key | NVEN | 1311 | | | | |
| P12 | Key | SLNXXXXXXNRXXXX | 1312 | | | | |
| | Key | NVEN | 1313 | | | | |
| P14 | Preferably | SLNVEXXXDXRXXXX | 1314 | | | | |
| | Key | SLNVEXXXXXRXXXX | 1315 | | | | |
| | Key | VEDNRRALR | 1316 | | | | |
| P15 | Key | XXNVXNXEXNRXXXX | 1317 | | | | |
| P17 | Preferably | XINVENVEDNRXXXX | 1318 | | | | |
| | Key | XXXVENVXDNXXXXX | 1319 | | | | |
| | Key | NVEN | 1320 | | | | |
| P20 | More preferably | SXNVENVEDNRRAXX | 1321 | | | | |
| | Preferably | XXXXENVEDNRRXXX | 1322 | | | | |
| | Key | XXXXXNXEDNRRXXX | 1323 | | | | |
| | Preferably | INVEN | 1324 | | | | |
| | Key | XNVEN | 1325 | | | | |
| | More preferably | EDNRRALR | 1326 | | | | |
| | Preferably | EDNRRAXX | 1327 | | | | |
| | Key | EDNRRXXX | 1328 | | | | |
| P22 | More preferably | XIXVEXXEDNRXALX | 1329 | | | | |
| | Preferably | XIXVEXXEDNRXXXX | 1330 | | | | |
| | Key | XIXVEXXXDNRXXXX | 1331 | | | | |
| | Preferably | SLNVEN | 1332 | | | | |
| | Key | INVEN | 1333 | | | | |
| P26 | Preferably | SLNVENVEDNRRXXX | 1334 | | | | |
| | Key | SLNVENVEDNRXXXX | 1335 | | | | |
| | Key | NVEN | 1336 | | | | |
| P32 | Preferably | XIXXXNVEDNRRXXX | 1337 | | | | |
| | Key | XIXXXXVEDNRRXXX | 1338 | | | | |
| | Preferably | INVEN | 1339 | | | | |
| | Key | NVEN | 1340 | | | | |
| | Key | NRRALR | 1341 | | | | |
| P33 | Preferably | SLNVENVEDNRXXXX | 1342 | | | | |
| | Key | XINVENVEDNRXXXX | 1343 | | | | |
| | Preferably | INVEN | 1344 | | | | |
| | Key | NVEN | 1345 | | | | |
| | Key | NRRALR | 1346 | | | | |
| P34 | More preferably | XIXVENVEDNRRALX | 1347 | | | | |
| | Preferably | XIXVENVEDNRRAXX | 1348 | | | | |
| | Key | XXXXEXVEXNRRXXX | 1349 | | | | |
| | More preferably | SLNVEN | 1350 | | | | |
| | Preferably | INVEN | 1351 | | | | |
| | Key | IXVEN | 1352 | | | | |
| P35 | Key | NVEN | 1353 | | | | |
| | Key | VEDNRRALR | 1354 | | | | |
| P36 | Key | XXXVXNVXDNRRXXX | 1355 | | | | |
| | Preferably | INVEN | 1356 | | | | |
| | Key | NVEN | 1357 | | | | |
| | Preferably | VEDNRRALR | 1358 | | | | |
| | Key | VXDNRRXXX | 1359 | | | | |
| P51 | Preferably | INVEN | 1360 | | | | |
| | Key | NVEN | 1361 | | | | |
| G7 | More preferably | SLNVENVEDNRRAXX | 1362 | | | | |
| | Preferably | XXNVXNVEDNRRXXX | 1363 | | | | |
| | Key | XXNXXNVEDNRRXXX | 1364 | | | | |
| | Preferably | SLNVEN | 1365 | | | | |
| | Key | INVEN | 1366 | | | | |

E21
Spot No. 2

| | | | | Food in which | | | |
|---|---|---|---|---|---|---|---|
| | | | SEQ ID | cross-reactivity | Graph | | SEQ ID |
| Protein name | LMW-m glutenin subunit 8 V9P767 | | NO | was confirmed | No. | Synthetic sequence | NO |
| 15-residue | KPWQQQPLPPQQQPP (positions 31-45 of | | 1367 | | | | |
| sequences | SEQ ID NO: 4) | | | | | | |
| P2 | Key | KPWQQQ | 1368 | | | | |
| | Preferably | QQPLPPQQ | 1369 | | | | |
| | Key | QPLPPQQ | 1370 | | | | |
| P4 | Preferably | QPLPPQQQP | 1371 | | | | |
| | Key | QPLPPQQQ | 1372 | | | | |
| P7 | More preferably | KPWQQQPLP | 1373 | | | | |
| | Preferably | PWQQQPLP | 1374 | | | | |
| | Key | PWQQQPL | 1375 | | | | |
| P9 | Preferably | KPWQQQPLXXXQXXP | 1376 | | | | |
| | Key | XPWQQXXXXXXXXXX | 1377 | | | | |
| | Preferably | QQPLPPQQQP | 1378 | | | | |
| | Key | QQPLXXXQXX | 1379 | | | | |
| P10 | Key | PWQQQPLPPQ | 1380 | | | | |
| P12 | Preferably | PWQQQPLPPQ | 1381 | | | | |
| | Key | PWQQQPLPP | 1382 | | | | |
| | Key | PPQQQ | 1383 | | | | |
| P14 | Key | KXWXQQPLXXXXXXX | 1384 | | | | |
| | Preferably | KPWQQQPLP | 1385 | | | | |
| | Key | KXWXQQPLX | 1386 | | | | |
| | More preferably | QQQPLPPQQQ | 1387 | | | | |
| | Preferably | QQPLPPQQQ | 1388 | | | | |
| | Key | QQPLXXXXX | 1389 | | | | |
| P15 | Key | PWQQQ | 1390 | | | | |
| | Key | QPLPPQQQ | 1391 | | | | |
| P21 | More preferably | KPWQQQPLPP | 1392 | | | | |
| | Preferably | QPLPPQQQ | 1393 | | | | |
| | Key | QPLP | 1394 | | | | |
| P24 | More preferably | KPWQQXXLXXQQQPP | 1395 | | | | |
| | Preferably | KPWQQXXXXXXXQPX | 1396 | | | | |
| | Key | XPWQQXXXXXXXXXX | 1397 | | | | |
| | More preferably | KPWQQQPLPP | 1398 | | | | |
| | Preferably | KPWQQXXLXX | 1399 | | | | |
| | Key | KPWQQXXXXX | 1400 | | | | |
| P35 | Preferably | KPWQQQ | 1401 | | | | |
| | Key | KPWQQX | 1402 | | | | |

E22
Spot No. 5

| | | | | Food in which | | | |
|---|---|---|---|---|---|---|---|
| | | | SEQ ID | cross-reactivity | Graph | | SEQ ID |
| Protein name | Alpha-gliadin Gli2-LM2-12 Q1WA40 | | NO | was confirmed | No. | Synthetic sequence | NO |
| 15-residue | QYLQPQQPISQQQAQ (positions 111-125 of | | 1403 | | | | |
| sequences | SEQ ID NO: 10) | | | | | | |
| P2 | Key | XYXXXXXXIXQXXXQ | 1404 | | | | |
| | Key | YLQPQQPISQ | 1405 | | | | |
| P3 | Key | XYXXPQQXIXXQQXX | 1406 | | | | |
| | Preferably | YLQPQQPISQ | 1407 | | | | |
| | Key | YXXPQQXIXX | 1408 | | | | |
| | Preferably | QPQQPISQQQ | 1409 | | | | |
| | Key | XPQQXIXXQQ | 1410 | | | | |
| | Preferably | QQPISQQQAQ | 1411 | | | | |
| | Key | QQXIXXQQXX | 1412 | | | | |
| P4 | Key | XXXXXXQXIXQXQXQ | 1413 | | | | |
| | Preferably | YLQPQQPISQ | 1414 | | | | |
| | Key | YLQPQQPIS | 1415 | | | | |
| P8 | Key | YLQPQQPIS | 1416 | | | | |
| | Key | QQPISQQQAQ | 1417 | | | | |
| P9 | Preferably | YLQPQQPISQ | 1418 | | | | |
| | Key | YLQPQQPIS | 1419 | | | | |
| | Key | SQQQA | 1420 | | | | |
| P10 | More preferably | YLQPQQPIS | 1421 | | | | |
| | Preferably | YLQPQQ | 1422 | | | | |
| | Key | YLQPQ | 1423 | | | | |
| | Key | SQQQA | 1424 | | | | |
| P12 | Preferably | YLQPQQPIS | 1425 | | | | |
| | Key | YLQPQ | 1426 | | | | |
| P14 | More preferably | YLQPQQPISQ | 1427 | | | | |
| | Preferably | YLQPQQPIS | 1428 | | | | |
| | Key | YLQPQQ | 1429 | | | | |
| P15 | Preferably | YLQPQQPIS | 1430 | | | | |
| | Key | YLQPQQP | 1431 | | | | |
| | Key | SQQQAQ | 1432 | | | | |
| P16 | Key | XYXXPXQPIXXXQXQ | 1433 | | | | |
| | Preferably | YLQPQQPI | 1434 | | | | |
| | Key | YXXPXQPI | 1435 | | | | |
| | Key | LQPQQP | 1436 | | | | |
| | Preferably | PQQPISQQQA | 1437 | | | | |
| | Key | PXQPIXXXQX | 1438 | | | | |
| | Key | SQQQA | 1439 | | | | |
| P18 | Key | XYXXXXQXXXQXQXQ | 1440 | | | | |
| | Preferably | YLQPQQPISQ | 1441 | | | | |
| | Key | YLQPQQPIS | 1442 | | | | |
| | Key | SQQQA | 1443 | | | | |
| P21 | Preferably | YLQPQQPIS | 1444 | | | | |
| | Key | YLQPQ | 1445 | | | | |
| | Preferably | PQQPISQQQ | 1446 | | | | |
| | Key | QQPISQQQ | 1447 | | | | |
| P22 | Preferably | XYLXPXQXIXQQQXQ | 1448 | | | | |
| | Key | XYLXPXQXIXXQQXQ | 1449 | | | | |
| | Further preferably | YLQPQQPISQ | 1450 | | | | |
| | More preferably | LQPQQPISQ | 1451 | | | | |
| | Preferably | LXPXQXIXQ | 1452 | | | | |
| | Key | LXPXQXIXX | 1453 | | | | |
| | More preferably | QQPISQQQAQ | 1454 | | | | |
| | Preferably | XQXIXQQQXQ | 1455 | | | | |
| | Key | XQXIXXQQXQ | 1456 | | | | |
| P24 | Preferably | XYLXPQQXISQXQXQ | 1457 | | | | |
| | Key | XXLXPXQXISXXQXQ | 1458 | | | | |
| | Further preferably | YLQPQQPISQ | 1459 | | | | |
| | More preferably | LQPQQPISQ | 1460 | | | | |
| | Preferably | LXPQQXISQ | 1461 | | | | |
| | Key | LXPXQXISX | 1462 | | | | |
| | Further preferably | QQPISQQQAQ | 1463 | | | | |
| | More preferably | QQPISQQQA | 1464 | | | | |
| | Preferably | QQXISQXQX | 1465 | | | | |
| | Key | XQXISXXQX | 1466 | | | | |
| P26 | Preferably | YLQPQQPIS | 1467 | | | | |
| | Key | YLQPQQP | 1468 | | | | |
| P27 | More preferably | XYXXPXQXISQXQXQ | 1469 | | | | |
| | Preferably | XXXXXXQXIXQXQXQ | 1470 | | | | |
| | Key | XXXXXXXXIXQXQXQ | 1471 | | | | |
| | Preferably | YLQPQQPIS | 1472 | | | | |
| | Key | YXXPXQXIS | 1473 | | | | |
| | Preferably | LQPQQPIS | 1474 | | | | |
| | Key | XXPXQXIS | 1475 | | | | |
| P32 | Key | XYXXXQXXIXXQQXX | 1476 | | | | |
| | Preferably | YLQPQQPISQ | 1477 | | | | |
| | Key | YLQPQQPIS | 1478 | | | | |
| P33 | Preferably | YLQPQQPISQ | 1479 | | | | |
| | Key | YLQPQQPIS | 1480 | | | | |
| P34 | Key | XYXXPXQXIXXXXXQ | 1481 | | | | |
| | More preferably | YLQPQQPISQ | 1482 | | | | |
| | Preferably | YLQPQQPIS | 1483 | | | | |
| | Key | YLQPQQP | 1484 | | | | |
| | Key | SQQQA | 1485 | | | | |
| P35 | Key | XYXXXXQXIXQQQXQ | 1486 | | | | |
| | Preferably | YLQPQQPISQ | 1487 | | | | |
| | Key | YLQPQQPIS | 1488 | | | | |
| | Preferably | QQPISQQQAQ | 1489 | | | | |
| | Key | XQXIXQQQXQ | 1490 | | | | |
| P36 | Key | XYXXXXQXXSXQQXQ | 1491 | | | | |
| | Preferably | YLQPQQPISQ | 1492 | | | | |
| | Key | YLQPQQPIS | 1493 | | | | |
| G6 | Preferably | YLQPQQPISQ | 1494 | | | | |
| | Key | YLQPQQPI | 1495 | | | | |
| G7 | More preferably | XXXXPQQXIXXXQAQ | 1496 | | | | |
| | Preferably | XXXXPXQXIXXXQAQ | 1497 | | | | |
| | Key | XXXXXXQXIXXXXAQ | 1498 | | | | |
| | More preferably | YLQPQQPISQ | 1499 | | | | |
| | Preferably | YLQPQQPIS | 1500 | | | | |
| | Key | XXXPQQXIX | 1501 | | | | |
| | Key | LQPQQP | 1502 | | | | |
| | Preferably | QPISQQQA | 1503 | | | | |
| | Key | QXIXXXQA | 1504 | | | | |
| | Key | SQQQA | 1505 | | | | |
| G9 | Preferably | YLQPQQP | 1506 | | | | |
| | Key | YLQPQ | 1507 | | | | |

E23
Spot No. 8, 14

| | | | | Food in which | | | |
|---|---|---|---|---|---|---|---|
| | | | SEQ ID | cross-reactivity | Graph | | SEQ ID |
| Protein name | Alpha-gliadin (Fragment) A0A0E3UR64 | | NO | was confirmed | No. | Synthetic sequence | NO |
| 15-residue | QVPLVQQQQFLGQQQ (positions 41-55 | | 1508 | | | | |
| sequences | of SEQ ID NOs: 15 and 28) | | | | | | |
| P3 | Preferably | QVPLVQQ | 1509 | | | | |
| | Key | QXXLVQQ | 1510 | | | | |
| P4 | More preferably | QVPLVQQQQFLGQXQ | 1511 | | | | |
| | Preferably | QVPLVQQQQFXGQXX | 1512 | | | | |
| | Key | XVPLVQQQQXXXQXX | 1513 | | | | |
| | Preferably | QVPLVQQQQ | 1514 | | | | |
| | Key | XVPLVQQQQ | 1515 | | | | |
| P7 | Preferably | QXXXVQQXXXXXXQQ | 1516 | | | | |
| | Key | QXXXVQQXXXXXXQX | 1517 | | | | |
| | Preferably | QVPLVQQ | 1518 | | | | |
| | Key | QXXXVQQ | 1519 | | | | |
| P8 | Preferably | QVPLVQQ | 1520 | | | | |
| | Key | QXXLVQQ | 1521 | Wheat/rye/barley | 3 | QVPLVQQ | 2901 |
| P10 | Key | XXXXVQQXXXXXXQQ | 1522 | | | | |
| | Further preferably | QVPLVQQQQF | 1523 | | | | |
| | More preferably | QVPLVQQQQ | 1524 | | | | |
| | Preferably | LVQQQQFLG | 1525 | | | | |
| | Key | VQQQ | 1526 | | | | |
| P12 | More preferably | QVPLVQQQQ | 1527 | | | | |
| | Preferably | QVPLVQQ | 1528 | | | | |
| | Key | QXXLVQQ | 1529 | | | | |
| P14 | Preferably | XXXXVQQQQFXGQQQ | 1530 | | | | |
| | Key | XXXXVQQQXXXXQQQ | 1531 | | | | |
| | Preferably | QVPLVQQQ | 1532 | | | | |
| | Key | XXXXVQQQ | 1533 | | | | |
| | Preferably | QQQQFLG | 1534 | | | | |
| | Key | QQQQFXG | 1535 | | | | |
| P17 | Preferably | QXXLVQQXXXXGQXX | 1536 | | | | |
| | Key | XXXXVQQXXXXGQXX | 1537 | | | | |
| | Further preferably | LVQQQQFLGQ | 1538 | | | | |
| | More preferably | LVQQQQFLG | 1539 | | | | |
| | Preferably | VQQQQFLG | 1540 | | | | |
| | Key | VQQXXXXG | 1541 | | | | |
| P21 | More preferably | QVPLVQQQQ | 1542 | | | | |
| | Preferably | QVPLVQQ | 1543 | | | | |
| | Key | QXXXVQQ | 1544 | | | | |
| P34 | Preferably | XXPLVXQQQXLGQQQ | 1545 | | | | |
| | Key | XXXXXXQQQXLGQQX | 1546 | | | | |
| | More preferably | QVPLVQQQQ | 1547 | | | | |
| | Preferably | QVPLVQQQ | 1548 | | | | |
| | Key | XXPLVXQQ | 1549 | | | | |
| | More preferably | LVQQQQFLGQ | 1550 | | | | |
| | Preferably | QQQQFLGQ | 1551 | | | | |
| | Key | XQQQXLGQ | 1552 | | | | |
| P35 | Preferably | QXPLVQQXQFLGQQQ | 1553 | | | | |
| | Key | XXXLVQQXXXXGQQQ | 1554 | | | | |
| | Preferably | QVPLVQQQ | 1555 | | | | |
| | Key | LVQQQ | 1556 | | | | |
| P50 | More preferably | QVPLVQQQQF | 1557 | | | | |
| | Preferably | PLVQQQQF | 1558 | | | | |
| | Key | XPXVXXQXF | 1559 | | | | |
| | Key | QQQFLGQQ | 1560 | | | | |
| G7 | Key | XVPLVQQQQFLGQQQ | 1561 | | | | |
| | More preferably | QVPLVQQQQF | 1562 | | | | |
| | Preferably | QVPLVQQQQ | 1563 | | | | |
| | Key | XVPLVQQQQ | 1564 | | | | |
| | Key | QQQQFLGQ | 1565 | | | | |

E24
Spot No. 3

| | | | | Food in which | | | |
|---|---|---|---|---|---|---|---|
| | | | SEQ ID | cross-reactivity | Graph | | SEQ ID |
| Protein name | Gamma-gliadin P08453 | | NO | was confirmed | No. | Synthetic sequence | NO |
| 15-residue | PQQPQQPFPQTQQPQ (positions 85-99, 103- | | 1566 | | | | |
| sequences | 107 and 121-135 of SEQ ID NO: 6) | | | | | | |
| P3 | More preferably | | | | | | |
| | Preferably | PFPQTQQ | 1567 | | | | |
| | Key | PFPQTQ | 1568 | | | | |
| P12 | Key | XXXXXXXXXQTQQXX | 1569 | | | | |
| P16 | More preferably | PQQXQQPFPQTQQXQ | 1570 | | | | |
| | Preferably | PQQXQQPFPQTQXXX | 1571 | | | | |
| | Key | PQQXQQPFPQTXXXX | 1572 | | | | |
| | Preferably | PQQPQQPFP | 1573 | | | | |
| | Key | PQQXQQPFP | 1574 | | | | |
| | Preferably | QQPQQ | 1575 | | | | |
| | Key | QQXQQ | 1576 | | | | |
| | More preferably | PFPQTQQ | 1577 | | | | |
| | Preferably | PFPQTQX | 1578 | | | | |
| | Key | PFPQTXX | 1579 | | | | |
| P20 | Further preferably | QPFPQTQQPQ | 1580 | | | | |
| | More preferably | PFPQTQQPQ | 1581 | | | | |
| | Preferably | FPQTQQPQ | 1582 | | | | |
| | Key | XXXTQQXQ | 1583 | | | | |
| P21 | Preferably | XXXXXXXXXQTQQPQ | 1584 | | | | |
| | Key | XXXXXXXXXQTQQXQ | 1585 | | | | |
| | More preferably | QQPFPQTQQP | 1586 | | | | |
| | Preferably | XXXXXQTQQP | 1587 | | | | |
| | Key | XXXXXQTQQX | 1588 | | | | |
| P50 | Key | XXXXXQPFXXXXXXQ | 1589 | | | | |
| | Preferably | QPFPQTQQPQ | 1590 | | | | |
| | Key | QPFPQTQQP | 1591 | | | | |
| P52 | Key | XXQPXQPFPQTQQPQ | 1592 | | | | |
| | Most preferably | QPQQPFPQ | 1593 | | | | |
| | Further preferably | QPQQPFP | 1594 | | | | |
| | More preferably | QPQQPF | 1595 | | | | |
| | Preferably | QPXQPF | 1596 | | | | |
| | Key | QXXQPF | 1597 | | | | |

E25
Spot No. 3

| | | | | Food in which | | | |
|---|---|---|---|---|---|---|---|
| | | | SEQ ID | cross-reactivity | Graph | | SEQ ID |
| Protein name | Gamma-gliadin P08453 | | NO | was confirmed | No. | Synthetic sequence | NO |
| 15-residue | PQQPAQLEAIRSLVL (positions 281-295 of | | 1598 | | | | |
| sequences | SEQ ID NO: 6) | | | | | | |
| P3 | Preferably | PQXXAQLXXIRSXVL | 1599 | | | | |
| | Key | XXXXAQLXXLRSXVL | 1600 | | | | |
| | Preferably | AQLEAIRSL | 1601 | | | | |
| | Key | AQLXXIRSX | 1602 | | | | |
| P10 | Preferably | XQQPAQLXALRSLVL | 1603 | | | | |
| | Key | XQQPAQLXXIRSXVX | 1604 | | | | |
| | More preferably | AQLEAIRS | 1605 | | | | |
| | Preferably | AQLXALRS | 1606 | | | | |
| | Key | AQLXXIRS | 1607 | | | | |

E26
Spot No. 13

| | | | | Food in which | | | |
|---|---|---|---|---|---|---|---|
| | | | SEQ ID | cross-reactivity | Graph | | SEQ ID |
| Protein name | Elongation factor 1-alpha Q03033 | | NO | was confirmed | No. | Synthetic sequence | NO |
| 15-residue | VGYNPDKVPFVPISG (positions 181-195 of | | 1608 | | | | |
| sequences | SEQ ID NO: 24) | | | | | | |
| P8 | Preferably | XGYXXDKVPXXPXXX | 1609 | | | | |
| | Key | XGYXXDKXXXXXXXX | 1610 | | | | |
| | Key | YNPD | 1611 | | | | |
| P15 | Key | XGYXPDKVXXXXXXX | 1612 | | | | |
| | Key | YNPD | 1613 | | | | |
| P16 | Key | YNPD | 1614 | | | | |
| P17 | Key | YNPD | 1615 | | | | |
| | Key | FVPISG | 1616 | | | | |
| P20 | Preferably | VPFVPISG | 1617 | | | | |
| | Key | FVPISG | 1618 | | | | |
| P21 | Key | FVPISG | 1619 | | | | |
| P24 | Preferably | YNPDKV | 1620 | | | | |
| | Key | YNPD | 1621 | | | | |
| P25 | Key | VGYXXXKXXXXXXXX | 1622 | | | | |
| | Key | YNPD | 1623 | | | | |
| | Key | FVPISG | 1624 | | | | |
| P26 | Key | XGYXXXKVXXXXXXX | 1625 | | | | |
| | Key | YNPD | 1626 | | | | |
| P27 | Key | XGYXXDKXXXXXXXX | 1627 | | | | |
| | Preferably | YNPDKVP | 1628 | | | | |
| | Key | YNPD | 1629 | | | | |
| | Key | PDKVPFVPIS | 1630 | | | | |
| P28 | Key | DKVPFVPISG | 1631 | | | | |
| P29 | Key | YNPD | 1632 | | | | |
| P31 | Key | YNPD | 1633 | | | | |
| P32 | Preferably | YNPDKVPF | 1634 | | | | |
| | Key | YNPD | 1635 | | | | |
| P33 | Key | XGYXXXKVXFXPXXX | 1636 | | | | |
| | Key | YNPDKVPF | 1637 | | | | |
| P34 | Key | XXYXXDKVXXXXXXX | 1638 | | | | |
| | Key | YNPDKV | 1639 | | | | |
| | Key | DKVPFVPISG | 1640 | | | | |
| P35 | Preferably | YNPDKVP | 1641 | | | | |
| | Key | YNPD | 1642 | | | | |
| | Key | PDKVPFVPIS | 1643 | | | | |
| P36 | Key | XXYXXXKVXXXXIXX | 1644 | | | | |
| | More preferably | YNPDKVPFV | 1645 | | | | |
| | Preferably | YNPDKVPF | 1646 | | | | |
| | Key | YNPD | 1647 | | | | |
| | Key | FVPISG | 1648 | | | | |
| P50 | Key | XGYXXXKVXXXXXXX | 1649 | | | | |
| | Preferably | YNPDKVPF | 1650 | | | | |
| | Key | NPDKVP | 1651 | | | | |
| P51 | Key | XGYXXDXVXXVXIXX | 1652 | | | | |
| | Preferably | YNPDKVPFV | 1653 | | | | |
| | Key | YNPDKVPF | 1654 | | | | |
| | Key | FVPISG | 1655 | | | | |
| P53 | Key | NPDKVPFV | 1656 | | | | |
| | Key | VPFVPISG | 1657 | | | | |
| P54 | Key | KVPFVPISG | 1658 | | | | |
| G1 | Preferably | YNPDKVPF | 1659 | | | | |
| | Key | YNPDK | 1660 | Wheat/rye/barley | 4 | YNPDK | 2902 |
| | Key | FVPISG | 1661 | Wheat/barley | 4 | FVPISG | 2903 |
| G2 | Key | XXYXXDKVXXXPXXX | 1662 | | | | |
| | Preferably | YNPDKVPFV | 1663 | | | | |
| | Key | YNPDKVPF | 1664 | | | | |
| | Key | VPFVPISG | 1665 | | | | |
| G3 | Preferably | YNPDKVP | 1666 | | | | |
| | Key | NPDKVP | 1667 | | | | |
| | Key | FVPISG | 1668 | | | | |
| G4 | More preferably | GYNPDKVPFV | 1669 | | | | |
| | Preferably | YNPDKVPFV | 1670 | | | | |
| | Key | YNPDKVPF | 1671 | | | | |
| | Key | PDKVPFVPIS | 1672 | | | | |
| G5 | More preferably | XGYXXDKVXXVPXXG | 1673 | | | | |
| | Preferably | XXXXXDKVXXVPXXG | 1674 | | | | |
| | Key | XXXXXDKVXXVPXXX | 1675 | | | | |
| | Preferably | KVPFVPISG | 1676 | | | | |
| | Key | PFVPISG | 1677 | | | | |
| G6 | Preferably | XXYXXDKVPXXPIXG | 1678 | | | | |
| | Key | XXYXXDKVXXXXIXX | 1679 | | | | |
| | More preferably | YNPDKVPF | 1680 | | | | |
| | Preferably | DKVPF | 1681 | | | | |
| | Key | DKVPX | 1682 | | | | |
| G9 | Key | YNPDKVPF | 1683 | | | | |
| | Key | FVPISG | 1684 | | | | |

E27
Spot No. 3

| | | | | Food in which | | | |
|---|---|---|---|---|---|---|---|
| | | | SEQ ID | cross-reactivity | Graph | | SEQ ID |
| Protein name | Elongation factor 1-alpha Q03033 | | NO | was confirmed | No. | Synthetic sequence | NO |
| 15-residue | PAKEAANFTSQVILM (positions 321-335 of | | 1685 | | | | |
| sequences | SEQ ID NO: 24) | | | | | | |
| P5 | Key | PXKXXANXXXXXXXX | 1686 | | | | |
| | Key | EAANFT | 1687 | | | | |
| P14 | Key | KEAA | 1688 | | | | |
| | Key | SQVILM | 1689 | | | | |
| P16 | Key | EAANFT | 1690 | | | | |
| P19 | Preferably | PXKXAANXXXQXXXM | 1691 | | | | |
| | Key | PXKXAAXXXXXXXXM | 1692 | | | | |
| | Preferably | KEAANFTS | 1693 | | | | |
| | Key | EAANFTS | 1694 | | | | |
| P20 | Key | EAANFT | 1695 | | | | |
| P21 | Preferably | PXKXXANFTXXXXXM | 1696 | | | | |
| | Key | XXKXXANFTXXXXXX | 1697 | | | | |
| | More preferably | KEAANFT | 1698 | | | | |
| | Preferably | EAANFT | 1699 | | | | |
| | Key | XXANFT | 1700 | | | | |
| P25 | Key | EAANFT | 1701 | | | | |
| | Key | SQVILM | 1702 | | | | |
| P27 | Key | EAANFT | 1703 | | | | |
| P28 | Key | EAANFT | 1704 | | | | |
| P29 | Key | PXKEAAXXXXXXXXM | 1705 | | | | |
| | Key | EAANFT | 1706 | | | | |
| | Key | SQVILM | 1707 | | | | |
| P34 | Preferably | PXKEAANFXSXXXXX | 1708 | | | | |
| | Key | XXKEAAXXXXXXXXX | 1709 | | | | |
| | More preferably | KEAANFTS | 1710 | | | | |
| | Preferably | KEAANFT | 1711 | | | | |
| | Key | EAANF | 1712 | | | | |
| P35 | Key | PXKXXXNXXSXXXXX | 1713 | | | | |
| | Preferably | KEAANF | 1714 | | | | |
| | Key | KEAA | 1715 | | | | |
| | Key | SQVILM | 1716 | | | | |
| P36 | Key | XXKEAANXXXXXXXM | 1717 | | | | |
| | More preferably | EAANFT | 1718 | | | | |
| | Preferably | EAANF | 1719 | | | | |
| | Key | EAANX | 1720 | | | | |
| P50 | Key | PXKXAXXXXSXXXXX | 1721 | | | | |
| | Preferably | KEAANFT | 1722 | | | | |
| | Key | KEAANF | 1723 | | | | |
| P51 | Preferably | PAKEXAXXXXXVXXX | 1724 | | | | |
| | Key | PXKEXAXXXXXXXXX | 1725 | | | | |
| | Preferably | KEAANFTS | 1726 | | | | |
| | Key | KEAANF | 1727 | | | | |
| P52 | Key | KEAANF | 1728 | | | | |
| | Preferably | ANFTSQVIIM | 1729 | | | | |
| | Key | SQVILM | 1730 | | | | |
| P53 | Key | PXKEAXXXXXXXXXX | 1731 | | | | |
| | Key | KEAA | 1732 | | | | |
| P56 | Key | XXKXXAXXTSXXXXX | 1733 | | | | |
| | Preferably | KEAANFT | 1734 | | | | |
| | Key | EAANFT | 1735 | | | | |
| P57 | Key | XXKEAAXXXXXXXXM | 1736 | | | | |
| | Preferably | KEAANFT | 1737 | | | | |
| | Key | EAANF | 1738 | | | | |
| G1 | Preferably | KEAANFT | 1739 | | | | |
| | Key | KEAANF | 1740 | Wheat/barley | 4 | KEAANF | 2904 |
| | Key | SQVILM | 1741 | Wheat/barley | 4 | SQVIIM | 2905 |
| G4 | Preferably | KEAAN | 1742 | | | | |
| | Key | EAAN | 1743 | | | | |
| G5 | Preferably | PAKEAAXXXXXXXXX | 1744 | | | | |
| | Key | PXKXAAXXXXXXXXX | 1745 | | | | |
| | Preferably | EAANFTS | 1746 | | | | |
| | Key | EAANFT | 1747 | | | | |
| G6 | Key | PXKXXAXXXSXXIXX | 1748 | | | | |
| | Key | EAANFT | 1749 | | | | |
| G7 | Key | KEAANFT | 1750 | | | | |
| | Key | SQVILM | 1751 | | | | |
| G8 | Key | ANFTSQVIIM | 1752 | | | | |

E28
Spot No. 13

| | | | | Food in which | | | |
|---|---|---|---|---|---|---|---|
| | | | SEQ ID | cross-reactivity | Graph | | SEQ ID |
| Protein name | Elongation factor 1-alpha Q03033 | | NO | was confirmed | No. | Synthetic sequence | NO |
| 15-residue | VKEVSSYLKKVGYNP (positions 171-185 of | | 1753 | | | | |
| sequences | SEQ ID NO: 24) | | | | | | |
| P7 | Key | XXXXXSYLKKVXXXX | 1754 | | | | |
| | Key | YLKK | 1755 | | | | |
| P8 | Key | VSSYLKK | 1756 | Wheat/rye/barley | 3 | VSSYLKK | 2906 |
| | Key | KVGYNP | 1757 | Wheat/rye/barley | 3 | KVGYNP | 2907 |
| P14 | Key | YLKK | 1758 | | | | |
| P17 | Key | YLKK | 1759 | | | | |
| P18 | Key | EVSSYLKKV | 1760 | | | | |
| | Key | YLKKVGYN | 1761 | | | | |
| P27 | Key | KEVSSYLKK | 1762 | | | | |
| | Key | LKKVGYN | 1763 | | | | |
| P30 | Key | KEVSSYLKKV | 1764 | | | | |
| | Key | YLKKVGYN | 1765 | | | | |
| P31 | Key | XXXVSXYXXXVGXXX | 1766 | | | | |
| P33 | Key | KKVGYNP | 1767 | | | | |
| P35 | Key | VSSYLKK | 1768 | | | | |
| | Key | KVGYNP | 1769 | | | | |
| P50 | Key | VSSYLKK | 1770 | | | | |
| | Key | KVGYNP | 1771 | | | | |
| P55 | Key | XXEXXXYLXXVXXXX | 1772 | | | | |
| | Key | EVSSYLKK | 1773 | | | | |
| | Preferably | YLKKVGYNP | 1774 | | | | |
| | Key | LKKVGYN | 1775 | | | | |
| G2 | Key | XXEVXSYXKXVXXXX | 1776 | | | | |
| | Key | KEVSSYLKK | 1777 | | | | |
| | Key | KVGY | 1778 | | | | |
| G3 | Key | XXXVSSYLXXVXXXP | 1779 | | | | |
| | Key | YLKKVG | 1780 | | | | |
| G4 | Key | KEVSSYLKKV | 1781 | | | | |
| | Key | VSSYLKKVGY | 1782 | | | | |
| | Key | KVGYNP | 1783 | | | | |
| G5 | Key | LKKVGYNP | 1784 | | | | |
| G7 | Key | LKKVGYNP | 1785 | | | | |
| G9 | Preferably | KEVSSYLKK | 1786 | | | | |
| | Key | KEVSSYLK | 1787 | | | | |
| | Key | LKKVGYNP | 1788 | | | | |

E29
Spot No. 3

| | | | | Food in which | | | |
|---|---|---|---|---|---|---|---|
| | | | SEQ ID | cross-reactivity | Graph | | SEQ ID |
| Protein name | Elongation factor 1-alpha Q03033 | | NO | was confirmed | No. | Synthetic sequence | NO |
| 15-residue | SGKELEALPKFLKNG (positions 371-385 of | | 1789 | | | | |
| sequences | SEQ ID NO: 24) | | | | | | |
| P3 | Key | SGKELE | 1790 | | | | |
| | Key | PKFL | 1791 | | | | |
| P8 | Key | SGKELE | 1792 | Wheat/rye/barley | 3 | SGKELE | 2908 |
| P9 | Key | SGKELEALPK | 1793 | | | | |
| P15 | Preferably | XXKXLEXXPXFLKNX | 1794 | | | | |
| | Key | XXXXXEXXXXFLKXX | 1795 | | | | |
| | Preferably | SGKELEALPK | 1796 | | | | |
| | Key | XXKXLEXXPX | 1797 | | | | |
| | Preferably | EALPKFLKN | 1798 | | | | |
| | Key | KFLK | 1799 | | | | |
| P17 | Key | KELEALPK | 1800 | | | | |
| | Key | LEALPKFLKN | 1801 | | | | |
| P18 | Preferably | SGKELEALPK | 1802 | | | | |
| | Key | SGKELE | 1803 | | | | |
| | Key | KFLKN | 1804 | | | | |
| P22 | Key | XXKEXEAXPXXXXXX | 1805 | | | | |
| | Key | ELEALPK | 1806 | | | | |
| | Key | PKFLKNG | 1807 | | | | |
| P26 | Key | SXXELEAXPXFLKXX | 1808 | | | | |
| | Preferably | ELEALPKFL | 1809 | | | | |
| | Key | ELEAXPXFL | 1810 | | | | |
| | Preferably | ALPKFLKNG | 1811 | | | | |
| | Key | AXPXFLKXX | 1812 | | | | |
| P27 | Key | XXKEXEXXPXXXXXX | 1813 | | | | |
| | Key | KELEAL | 1814 | | | | |
| P29 | Key | PKFLK | 1815 | | | | |
| P30 | Key | LEALPKFL | 1816 | | | | |
| P32 | Key | SGKELE | 1817 | | | | |
| | Key | PKFL | 1818 | | | | |
| P33 | Key | SGKELEALPK | 1819 | | | | |
| | Key | PKFLK | 1820 | | | | |
| P34 | Key | SGKELEALPK | 1821 | | | | |
| P35 | Key | SGKELEALPK | 1822 | | | | |
| | Key | LPKFL | 1823 | | | | |
| P36 | Key | LPKFLK | 1824 | | | | |
| P52 | Key | LPKF | 1825 | | | | |
| G1 | Key | PKFL | 1826 | Wheat/rye/barley | 4 | PKFL | 2909 |
| G4 | Key | XXXELEXXXXXLXXX | 1827 | | | | |
| | Key | LEALPKFLK | 1828 | | | | |
| G6 | Key | XXXELEXXPXXLXXX | 1829 | | | | |
| | Key | LPKFL | 1830 | | | | |
| G7 | Key | XXKXLEXXPXXXXXX | 1831 | | | | |
| | Key | KELE | 1832 | | | | |
| | Key | KFLKN | 1833 | | | | |
| G9 | Key | XXKELXXXPKFLKNX | 1834 | | | | |
| | Key | KFLK | 1 R15 | | | | |

E30
Spot No. 4

| | | | | Food in which | | | |
|---|---|---|---|---|---|---|---|
| | | | SEQ ID | cross-reactivity | Graph | | SEQ ID |
| Protein name | Fructose-b sphosphate aldolase W5CCA9 | | NO | was confirmed | No. | Synthetic sequence | NO |
| 15-residue | VIAEYTVRTLQRTVP (positions 233-247 of | | 1836 | | | | |
| sequences | SEQ ID NO: 8) | | | | | | |
| P3 | Preferably | VRTLQRT | 1837 | | | | |
| | Key | RTLQ | 1838 | | | | |
| P5 | Preferably | TVRTLQR | 1839 | | | | |
| | Key | RTLQ | 1840 | | | | |
| P8 | Preferably | YTVRTLQ | 1841 | | | | |
| | Key | TVRTLQ | 1842 | Wheat/rye/barley/ | 3 | TVRTLQ | 2911 |
| | | | | timothy | | | |
| P9 | Preferably | TVRTLQR | 1843 | | | | |
| | Key | TVRTLQ | 1844 | | | | |
| P12 | Preferably | YTVRTLQR | 1845 | | | | |
| | Key | TVRTLQR | 1846 | | | | |
| P16 | Key | XXXXYXVXXXQRXXX | 1847 | Wheat/rye/barley/ | 2 | VIAEYTVRTLQRTVP | 1836 |
| | | | | timothy | | SLAEYTVRTLQRTVP | 2910 |
| | More preferably | YTVRTLQRT | 1848 | | | | |
| | Preferably | TVRTLQR | 1849 | | | | |
| | Key | VRTLQ | 1850 | | | | |
| P17 | Key | XXXXYTVXXXXRXXX | 1851 | | | | |
| | More preferably | YTVRTLQRT | 1852 | | | | |
| | Preferably | TVRTLQR | 1853 | | | | |
| | Key | RTLQR | 1854 | | | | |
| P18 | Key | XXXXYTVXXXQRXXP | 1855 | | | | |
| | More preferably | YTVRTLQRT | 1856 | | | | |
| | Preferably | TVRTLQR | 1857 | | | | |
| | Key | RTLQ | 1858 | | | | |
| P19 | Preferably | YTVRTLQR | 1859 | | | | |
| | Key | TVRTLQ | 1860 | | | | |
| P24 | Preferably | TVRTLQRT | 1861 | | | | |
| | Key | VRTLQ | 1862 | | | | |
| P25 | Key | VIAEYTVRTL | 1863 | | | | |
| | Key | TVRTLQR | 1864 | | | | |
| P26 | Key | TVRTLQR | 1865 | | | | |
| P27 | Key | TVRTLQR | 1866 | | | | |
| P28 | Preferably | TVRTLQR | 1867 | | | | |
| | Key | TVRTLQ | 1868 | | | | |
| P29 | More preferably | YTVRTLQRT | 1869 | | | | |
| | Preferably | YTVRTLQR | 1870 | | | | |
| | Key | VRTLQR | 1871 | | | | |
| P30 | Preferably | YTVRTLQRT | 1872 | | | | |
| | Key | TVRTLQR | 1873 | | | | |
| P31 | Key | XXXXYTVXXLXRXXX | 1874 | | | | |
| | More preferably | TVRTLQRTV | 1875 | | | | |
| | Preferably | VRTLQRT | 1876 | | | | |
| | Key | TLQR | 1877 | | | | |
| P32 | Preferably | TVRTLQRT | 1878 | | | | |
| | Key | TVRTLQ | 1879 | | | | |
| P33 | Preferably | TVRTLQRT | 1880 | | | | |
| | Key | TVRTLQR | 1881 | | | | |
| P34 | Preferably | TVRTLQRT | 1882 | | | | |
| | Key | VRTLQ | 1883 | | | | |
| P35 | Preferably | TVRTLQRT | 1884 | | | | |
| | Key | RTLQ | 1885 | | | | |
| P36 | Key | TVRTLQRT | 1886 | | | | |
| G5 | Preferably | YTVRTLQRTV | 1887 | | | | |
| | Key | TVRTLQRT | 1888 | | | | |
| G6 | Preferably | TVRTLQR | 1889 | | | | |
| | Key | RTLQ | 1890 | | | | |
| G7 | Key | YTVRTL | 1891 | | | | |
| G9 | Key | XXXXYTVXXLQRTXP | 1892 | | | | |
| | Preferably | YTVRTLQRT | 1893 | | | | |
| | Key | VRTLQ | 1894 | | | | |

E31
Spot No. 1, 5, 6

| | | | | Food in which | | | |
|---|---|---|---|---|---|---|---|
| | | | SEQ ID | cross-reactivity | Graph | | SEQ ID |
| Protein name | Alpha-gliadin (Fragment) A0A0E3Z522 | | NO | was confirmed | No. | Synthetic sequence | NO |
| 15-residue | QVPLVQQQQFPGQQQ (positions 41-55 of | | 1895 | | | | |
| sequences | SEQ ID NOs: 2, 10 and 12) | | | | | | |
| P2 | Preferably | VPLVQQQ | 1896 | | | | |
| | Key | VPLVQQ | 1897 | | | | |
| | Key | QQFPGQQQ | 1898 | | | | |
| P3 | Key | QXXLVQQXXXXXXXX | 1899 | | | | |
| | Preferably | QVPLVQQ | 1900 | | | | |
| | Key | VPLVQ | 1901 | | | | |
| | Key | QQFPGQQ | 1902 | | | | |
| P4 | Key | QVXXXQQXXXXXXXX | 1903 | | | | |
| | Preferably | QVPLVQQ | 1904 | | | | |
| | Key | VPLVQ | 1905 | | | | |
| | Key | QFPGQQQ | 1906 | | | | |
| P7 | Key | QVXXXQQXXXXXXXX | 1907 | | | | |
| | Preferably | QVPLVQQ | 1908 | | | | |
| | Key | VPLVQ | 1909 | | | | |
| | Key | QFPGQQQ | 1910 | | | | |
| P8 | Key | QXXLVQQXXXXXXXX | 1911 | | | | |
| | Preferably | QVPLVQQQ | 1912 | | | | |
| | Key | QVPLVQQ | 1913 | Wheat/rye/barley | 3 | QVPLVQQ | 2912 |
| | Key | QQFPGQQ | 1914 | Wheat/rye | 3 | QQFPGQQ | 2913 |
| P9 | Key | QVPLVQQQQ | 1915 | | | | |
| | Key | QQQQFPGQQQ | 1916 | | | | |
| P10 | Key | QXXXVQQXXXXXXQQ | 1917 | | | | |
| | Preferably | QVPLVQQQQ | 1918 | | | | |
| | Key | VPLVQQQ | 1919 | | | | |
| | Key | LVQQQQFPGQ | 1920 | | | | |
| P12 | Preferably | QVPLVQQQ | 1921 | | | | |
| | Key | QVPLVQQ | 1922 | | | | |
| | Preferably | QQFPGQQQ | 1923 | | | | |
| | Key | FPGQQ | 1924 | | | | |
| P13 | Key | QFPGQQ | 1925 | | | | |
| P14 | Preferably | QQQFPGQQQ | 1926 | | | | |
| | Key | QFPGQQ | 1927 | | | | |
| P15 | Key | VPLVQQQ | 1928 | | | | |
| | Preferably | QFPGQQQ | 1929 | | | | |
| | Key | FPGQQQ | 1930 | | | | |
| P17 | Key | QXXXVQQXXXXXXXQ | 1931 | | | | |
| | Preferably | QVPLVQQQ | 1932 | | | | |
| | Key | VPLVQQ | 1933 | | | | |
| P19 | Preferably | XXXXVQQQQXXXQQQ | 1934 | | | | |
| | Key | XXXXXQQXXXXXXQQ | 1935 | | | | |
| | Key | QVPLVQQ | 1936 | | | | |
| | Preferably | QQFPGQQQ | 1937 | | | | |
| | Key | QFPGQQ | 1938 | | | | |
| P21 | Preferably | QVPLVQQ | 1939 | | | | |
| | Key | VPLVQ | 1940 | | | | |
| | More preferably | QQFPGQQQ | 1941 | | | | |
| | Preferably | QQFPGQQ | 1942 | | | | |
| | Key | QFPGQQ | 1943 | | | | |
| P22 | More preferably | QFPGQQQ | 1944 | | | | |
| | Preferably | FPGQQ | 1945 | | | | |
| | Key | FPGQ | 1946 | | | | |
| P24 | Key | XXXXXQQXXXXXQQQ | 1947 | | | | |
| | Preferably | QVPLVQQQ | 1948 | | | | |
| | Key | VPLVQQ | 1949 | | | | |
| | More preferably | QQQFPGQQQ | 1950 | | | | |
| | Preferably | QFPGQQQ | 1951 | | | | |
| | Key | QFPGQQ | 1952 | | | | |
| P26 | Key | XXXXXXXQXXPGQQX | 1953 | | | | |
| | Preferably | QQFPGQQ | 1954 | | | | |
| | Key | QFPGQ | 1955 | | | | |
| P28 | Preferably | XXXXXXXQXXPGQQQ | 1956 | | | | |
| | Key | XXXXXXXXXXPGQQQ | 1957 | | | | |
| | More preferably | QQFPGQQQ | 1958 | | | | |
| | Preferably | QFPGQQ | 1959 | | | | |
| | Key | XXPGQQ | 1960 | | | | |
| P32 | Preferably | QQQQFPGQQ | 1961 | | | | |
| | Key | QQQFPGQQ | 1962 | | | | |
| P33 | Key | XXXXXQXQQXXXQQQ | 1963 | | | | |
| | More preferably | QQQFPGQQ | 1964 | | | | |
| | Preferably | QQFPGQQ | 1965 | | | | |
| | Key | QFPGQQ | 1966 | | | | |
| P34 | Key | VPLVQQQ | 1967 | | | | |
| | Key | QFPGQQ | 1968 | | | | |
| P35 | More preferably | QVXLVQQXXXPGQQQ | 1969 | | | | |
| | Preferably | QXXLVQQXXXXXXXQ | 1970 | | | | |
| | Key | XXXLVQQXXXXXXXX | 1971 | | | | |
| | More preferably | QVPLVQQQQ | 1972 | | | | |
| | Preferably | QVPLVQQQ | 1973 | | | | |
| | Key | VPLVQQ | 1974 | | | | |
| P50 | Key | LVQQQQFP | 1975 | | | | |
| G6 | Key | XXXXXXXXXFPGQXX | 1976 | | | | |

E32
Spot No. 13

| | | | | Food in which | | | |
|---|---|---|---|---|---|---|---|
| | | | SEQ ID | cross-reactivity | Graph | | SEQ ID |
| Protein name | Elongation factor 1-alpha Q03033 | | NO | was confirmed | No. | Synthetic sequence | NO |
| 15-residue | DPTGAKVTKAAIKKK (positions 433-447 of | | 1977 | | | | |
| sequences | SEQ ID NO: 24) | | | | | | |
| P2 | Preferably | PTGAKVTK | 1978 | | | | |
| | Key | TGAK | 1979 | | | | |
| | Key | AAIKK | 1980 | | | | |
| P12 | Key | DPTGAK | 1981 | | | | |
| P13 | | | | | | | |
| P14 | Key | PTGAK | 1982 | | | | |
| | Key | GAKVTKAAIK | 1983 | | | | |
| P15 | Key | DPXGXKXXXXXXXXX | 1984 | | | | |
| | Key | PTGAKVTK | 1985 | | | | |
| P17 | Key | AAIK | 1986 | | | | |
| P21 | Preferably | KAAIKK | 1987 | | | | |
| | Key | AAIK | 1988 | | | | |
| P22 | Key | XXXXXXXXKAAIKXX | 1989 | | | | |
| P26 | Preferably | XPXGAKVTKAAIKXX | 1990 | | | | |
| | Key | XXXXXXVXKAAIKXX | 1991 | | | | |
| | Key | TGAK | 1992 | | | | |
| P28 | Key | XXXXAXXTKAAIKXX | 1993 | | | | |
| P32 | Key | XXXXXXVTXAAXXXX | 1994 | | | | |
| | Key | DPTGAKVTK | 1995 | | | | |
| P35 | Key | VTKAA | 1996 | | | | |
| P36 | Key | XXXXAKVXXXAXXXX | 1997 | | | | |
| | Key | KVTK | 1998 | | | | |
| P52 | Preferably | DPTGAKVTKAAIXXX | 1999 | | | | |
| | Key | XXXXXKVTXAAIXXX | 2000 | | | | |
| | Key | GAKVTK | 2001 | | | | |
| P55 | Preferably | XXXXAKVTKAAXXXX | 2002 | | | | |
| | Key | XXXXXKVTXXAXXXX | 2003 | | | | |

E33
Spot No. 4

| | | | | Food in which | | | |
|---|---|---|---|---|---|---|---|
| | | | SEQ ID | cross-reactivity | Graph | | SEQ ID |
| Protein name | Fructose-b sphosphate aldolase W5CCA9 | | NO | was confirmed | No. | Synthetic sequence | NO |
| 15-residue | STGTIGKRFASLNVE (positions 23-37 of | | 2004 | | | | |
| sequences | SEQ ID NO: 8) | | | | | | |
| P2 | Key | XXXXXGXRXASXXXX | 2005 | | | | |
| | Key | ASLNV | 2006 | | | | |
| P8 | Key | XTXTIGXRXXXXXXX | 2007 | | | | |
| P12 | Preferably | KRFASI | 2008 | | | | |
| | Key | KRFA | 2009 | | | | |
| P15 | Key | KRFA | 2010 | | | | |
| P17 | Key | KRFA | 2011 | | | | |
| P21 | Key | XXGTIGXRXXXXNXX | 2012 | | | | |
| P22 | Key | XXGTIGXRXXXXXXX | 2013 | | | | |
| | Key | KRFA | 2014 | | | | |
| P24 | Key | KRFAS | 2015 | | | | |
| P26 | Key | XXXTIGXRXXXXXXX | 2016 | | | | |
| P27 | Key | TGTIGKRF | 2017 | | | | |
| | Key | KRFASLN | 2018 | | | | |
| P34 | Key | KRFASLN | 2019 | | | | |
| P35 | Key | STGTIGKRFA | 2020 | | | | |
| | Key | GKRFASLN | 2021 | | | | |
| P51 | Key | RFASIN | 2022 | | | | |
| P52 | Key | KRFASLN | 2023 | | | | |
| G6 | Key | KRFA | 2024 | | | | |
| G7 | Key | TGTIG | 2025 | | | | |
| | Key | KRFASLN | 2026 | | | | |

E34
Spot No. 4

| | | | | Food in which | | | |
|---|---|---|---|---|---|---|---|
| | | | SEQ ID | cross-reactivity | Graph | | SEQ ID |
| Protein name | Fructose-bisphosphate aldolase W5CCA9 | | NO | was confirmed | No. | Synthetic sequence | NO |
| 15-residue | TPGALQYLSGVLLFE (positions 53-67 of | | 2027 | | | | |
| sequences | SEQ ID NO: 8) | | | | | | |
| P3 | Key | PGALQYLSGV | 2028 | | | | |
| | Preferably | YLSGVLLF | 2029 | | | | |
| | Key | GVILF | 2030 | | | | |
| P8 | Key | YLSGV | 2031 | Wheat/rye/barley | 3 | YLSGV | 2914 |
| P12 | Preferably | YLSGVLLF | 2032 | | | | |
| | Key | YLSGV | 2033 | | | | |
| P14 | Key | PGALQYLS | 2034 | | | | |
| | Preferably | YLSGVLLF | 2035 | | | | |
| | Key | GVILF | 2036 | | | | |
| P15 | Key | PGALQYLSGV | 2037 | | | | |
| | Preferably | YLSGVLLF | 2038 | | | | |
| | Key | LSGVIL | 2039 | | | | |
| P16 | Key | YLSGVLLF | 2040 | | | | |
| P17 | Key | PGALQYLSGV | 2041 | | | | |
| | Key | YLSGVLLF | 2042 | | | | |
| P19 | Key | XPXXXQYXSXXXXFX | 2043 | | | | |
| | Preferably | YLSGVLLFE | 2044 | | | | |
| | Key | YLSGVLLF | 2045 | | | | |
| P24 | Key | PGALQYLSGV | 2046 | | | | |
| | Preferably | YLSGVLL | 2047 | | | | |
| | Key | GVIL | 2048 | | | | |
| P26 | Key | GALQ | 2049 | | | | |
| | Key | GVILF | 2050 | | | | |
| P28 | Key | PGALQYLSGV | 2051 | | | | |
| | Key | YLSGVLLF | 2052 | | | | |
| P29 | Preferably | PGALQYLSGV | 2053 | | | | |
| | Key | GALQ | 2054 | | | | |
| | Preferably | YLSGVLLF | 2055 | | | | |
| | Key | GVILF | 2056 | | | | |
| P30 | Key | PGALQ | 2057 | | | | |
| | Key | YLSGVLLF | 2058 | | | | |
| P32 | Key | YLSGVI | 2059 | | | | |
| P33 | Preferably | YLSGVLLF | 2060 | | | | |
| | Key | LSGV | 2061 | | | | |
| P34 | Key | LSGVIL | 2062 | | | | |
| P35 | Key | TPGALQYLS | 2063 | | | | |
| | Preferably | YLSGVLLF | 2064 | | | | |
| | Key | GVILF | 2065 | | | | |
| P36 | Preferably | YLSGVLLF | 2066 | | | | |
| | Key | GVIL | 2067 | | | | |

E35
Spot No. 6

| | | | | Food in which | | | |
|---|---|---|---|---|---|---|---|
| | | | SEQ ID | cross-reactivity | Graph | | SEQ ID |
| Protein name | Alpha-gliadin (Fragment) A0A0E3Z522 | | NO | was confirmed | No. | Synthetic sequence | NO |
| 15-residue | PPYCTIAPFGIFGTN (positions 281-295 of | | 2068 | | | | |
| sequences | SEQ ID NO: 12) | | | | | | |
| P3 | Key | XXYXTXAPFGLFGTN | 2069 | | | | |
| | Preferably | YCTIAPFGI | 2070 | | | | |
| | Key | CTIAP | 2071 | | | | |
| | Preferably | PFGIFGTN | 2072 | | | | |
| | Key | PFXIFXXX | 2073 | | | | |
| P8 | Key | CTIAPFGIF | 2074 | Wheat/barley | 3 | CTIAPFGIF | 2915 |
| | Preferably | PFGIFGTN | 2075 | | | | |
| | Key | GLFGTN | 2076 | Wheat/barley/rye 3 | GLFGTN | 2916 | |
| P10 | Key | CTIAP | 2077 | | | | |
| P12 | Preferably | YCTIAPFGI | 2078 | | | | |
| | Key | CTIAPFGI | 2079 | | | | |
| | Preferably | PFGIFGTN | 2080 | | | | |
| | Key | GLFGTN | 2081 | | | | |
| P17 | Key | XXYXXXXPFXLFXTN | 2082 | | | | |
| | Preferably | YCTIAPFGLF | 2083 | | | | |
| | Key | CTIAPFGI | 2084 | | | | |
| | Key | PFGIFGTN | 2085 | | | | |
| P21 | Preferably | YCTIAPFGLF | 2086 | | | | |
| | Key | CTIAPFGI | 2087 | | | | |
| | Key | GLFGTN | 2088 | | | | |
| P24 | Preferably | YCTIAPFGLF | 2089 | | | | |
| | Key | CTIAP | 2090 | | | | |
| | Preferably | PFGIFGTN | 2091 | | | | |
| | Key | PFXIFXXX | 2092 | | | | |
| P25 | Preferably | YCTIAPFGI | 2093 | | | | |
| | Key | CTIAPFG | 2094 | | | | |
| | Key | GLFGTN | 2095 | | | | |
| P26 | Key | CTIAPFGI | 2096 | | | | |
| | Key | PFGIFGTN | 2097 | | | | |
| P27 | Key | CTIAPFGIF | 2098 | | | | |
| | Preferably | PFXIFXXX | 2099 | | | | |
| | Key | PFGIFGTN | 2100 | | | | |
| P28 | Key | XXYXXXXPFXXFXXX | 2101 | | | | |
| | Preferably | CTIAPFGIF | 2102 | | | | |
| | Key | CTIAP | 2103 | | | | |
| | Key | PFGIFGTN | 2104 | | | | |
| P29 | Key | CTIAPFGIF | 2105 | | | | |
| | Key | FGLFGTN | 2106 | | | | |
| P30 | Key | CTIAPFGIF | 2107 | | | | |
| | Key | GLFGTN | 2108 | | | | |
| P32 | Key | CTIAPFGIF | 2109 | | | | |
| | Key | PFGIFGTN | 2110 | | | | |
| P33 | Key | XXYXXXAPFGLFGXN | 2111 | | | | |
| | Preferably | YCTIAPFGLF | 2112 | | | | |
| | Key | YCTIAP | 2113 | | | | |
| | Key | PFGIFGTN | 2114 | | | | |
| P34 | Preferably | CTIAPFGIF | 2115 | | | | |
| | Key | CTIAP | 2116 | | | | |
| | Preferably | PFGIFGTN | 2117 | | | | |
| | Key | PFXIFXXX | 2118 | | | | |
| P35 | Preferably | CTIAPFGI | 2119 | | | | |
| | Key | CTIA | 2120 | | | | |
| | Key | PFGIFGTN | 2121 | | | | |
| P36 | Key | XXXXXXXPFXLFXXN | 2122 | | | | |
| | Preferably | YCTIAPFGLF | 2123 | | | | |
| | Key | CTIAPFGI | 2124 | | | | |
| | Key | FGLFGTN | 2125 | | | | |
| P50 | Key | XXXXXXXPFXLFXXX | 2126 | | | | |
| | Key | CTIAP | 2127 | | | | |
| P51 | Key | XXYXTXXPFGLFXXX | 2128 | | | | |
| | Key | YCTIAPFGLF | 2129 | | | | |
| | Key | PFGIFGTN | 2130 | | | | |
| P52 | Key | XXXXXXXPFXIFXXX | 2131 | | | | |
| | Preferably | YCTIAPFGIF | 2132 | | | | |
| | Key | YCTIAPFGI | 2133 | | | | |
| P53 | Key | XXXXXXXPFXIFXXN | 2134 | | | | |
| | Key | PPYCTIAPFG | 2135 | | | | |
| | Preferably | CTIAPFGIF | 2136 | | | | |
| | Key | XXXXPFXIF | 2137 | | | | |
| | Key | FGTN | 2138 | | | | |
| P55 | Key | XXYXXXXPFGIFGTN | 2139 | | | | |
| | More preferably | YCTIAPFGIF | 2140 | | | | |
| | Preferably | YXXXXPFGLF | 2141 | | | | |
| | Key | XXXXXPFGLF | 2142 | | | | |
| | More preferably | IAPFGIFGTN | 2143 | | | | |
| | Preferably | FGIFGTN | 2144 | | | | |
| | Key | FGIFXXX | 2145 | | | | |
| G6 | Key | XXXXXXXPFXIFXXX | 2146 | | | | |
| | More preferably | CTIAPFGIF | 2147 | | | | |
| | Preferably | PFGLFGTN | 2148 | | | | |
| | Key | FGIF | 2149 | | | | |
| G7 | Key | XXXXXXXPFGIFXXX | 2150 | | | | |
| | Key | YCTIAPFGI | 2151 | | | | |
| | Preferably | IAPFGIFGTN | 2152 | | | | |
| | Key | GIFGTN | 2153 | | | | |

E36
Spot No. 1, 6, 14

| | | | | Food in which | | | |
|---|---|---|---|---|---|---|---|
| | | | SEQ ID | cross-reactivity | Graph | | SEQ ID |
| Protein name | Alpha/beta-gliadin MM1 P18573 | | NO | was confirmed | No. | Synthetic sequence | NO |
| 15-residue | YSQPQQPISQQQQQQ (positions 121- | | 2154 | | | | |
| sequences | 135 of SEQ ID NO: 2, positions | | | | | | |
| | 07-121 of SEQ ID NOs: 12 and 28) | | | | | | |
| P2 | More preferably | YSQPQQPISQ | 2155 | | | | |
| | Preferably | YSQPQQPIS | 2156 | | | | |
| | Key | SQPQQ | 2157 | | | | |
| P12 | Key | YSQPQQPISQ | 2158 | | | | |
| P20 | Preferably | YSQPQQPI | 2159 | | | | |
| | Key | SQPQQ | 2160 | | | | |
| P21 | Preferably | PQQPISQQQ | 2161 | | | | |
| | Key | QQPISQ | 2162 | | | | |
| P22 | Preferably | SQPQQPISQ | 2163 | | | | |
| | Key | SQPQQ | 2164 | | | | |
| P24 | More preferably | YSQPQQPISQ | 2165 | | | | |
| | Preferably | SQPQQPIS | 2166 | | | | |
| | Key | SQPQQ | 2167 | | | | |
| P25 | Key | YXXXXXXXXXXQQQX | 2168 | | | | |
| | More preferably | YSQPQQPI | 2169 | | | | |
| | Preferably | SQPQQP | 2170 | | | | |
| | Key | SQPQQ | 2171 | | | | |
| | Key | QQPISQQQQQ | 2172 | | | | |
| P26 | More preferably | YSQPQQPISQ | 2173 | | | | |
| | Preferably | YSQPQQ | 2174 | | | | |
| | Key | SQPQQ | 2175 | | | | |
| P27 | Preferably | YSQPQQPISQ | 2176 | | | | |
| | Key | SQPQQ | 2177 | | | | |
| P28 | More preferably | YSQPQQPISQ | 2178 | | | | |
| | Preferably | YSQPQQPI | 2179 | | | | |
| | Key | SQPQQ | 2180 | | | | |
| P29 | More preferably | YSQPQQPISQ | 2181 | | | | |
| | Preferably | SQPQQ | 2182 | | | | |
| | Key | QPQQ | 2183 | | | | |
| P30 | More preferably | YSQPQQPISQ | 2184 | | | | |
| | Preferably | YSQPQQPI | 2185 | | | | |
| | Key | SQPQQ | 2186 | | | | |
| P31 | Key | SQPQQ | 2187 | | | | |
| P32 | Key | YXQXXXXXXXXQQXX | 2188 | | | | |
| | Preferably | YSQPQQPISQ | 2189 | | | | |
| | Key | QPQQ | 2190 | | | | |
| P33 | Preferably | SQPQQ | 2191 | | | | |
| | Key | QPQQ | 2192 | | | | |
| P34 | Key | SQPQQ | 2193 | | | | |
| P35 | Preferably | YSQPQQ | 2194 | | | | |
| | Key | SQPQQ | 2195 | | | | |
| P36 | Preferably | YSQPQQPISQ | 2196 | | | | |
| | Key | SQPQQ | 2197 | | | | |
| P50 | Key | SQPQQ | 2198 | | | | |
| P53 | Key | YXXXQXXXXXQQQXX | 2199 | | | | |
| | More preferably | YSQPQQPISQ | 2200 | | | | |
| | Preferably | YSQPQQPI | 2201 | | | | |
| | Key | SQPQQ | 2202 | | | | |
| | Key | SQQQQQQ | 2203 | | | | |
| P54 | Key | YXXXXXXXXXQQQQQ | 2204 | | | | |
| | Preferably | YSQPQQPIS | 2205 | | | | |
| | Key | SQPQQPI | 2206 | | | | |
| | Preferably | QQPISQQQQQ | 2207 | | | | |
| | Key | XXXXXXQQQQ | 2208 | | | | |
| G5 | Preferably | YSQPQQ | 2209 | | | | |
| | Key | SQPQQ | 2210 | | | | |
| G6 | Preferably | YSQPQQPISQ | 2211 | | | | |
| | Key | SQPQQ | 2212 | | | | |
| G7 | Preferably | YSQPQQPISQ | 2213 | | | | |
| | Key | QPQQ | 2214 | | | | |
| G9 | Preferably | YSQPQQPIS | 2215 | | | | |
| | Key | SQPQQ | 2216 | | | | |

E37
Spot No. 11, 12

| | | | | Food in which | | | |
|---|---|---|---|---|---|---|---|
| | | | SEQ ID | cross-reactivity | Graph | | SEQ ID |
| Protein name | Globulin 3 B7U6L4 | | NO | was confirmed | No. | Synthetic sequence | NO |
| 15-residue | VSRLLRGLRNYRVAI (positions 161-175 of | | 2217 | | | | |
| sequences | SEQ ID NO: 22) | | | | | | |
| P2 | Key | SRLLRGLRNY | 2218 | | | | |
| | Preferably | IRNYRVAI | 2219 | | | | |
| | Key | NYRV | 2220 | | | | |
| P7 | Key | LRNYR | 2221 | | | | |
| P8 | Key | RLLRGIRNY | 2222 | Wheat | 3 | RLLRGIRNY | 2917 |
| | Key | LRNYRVA | 2223 | Wheat | 3 | IRNYRVA | 2918 |
| P16 | Key | LRNYRVA | 2224 | | | | |
| P17 | Key | VSRLLRGLRN | 2225 | | | | |
| | Key | RNYR | 2226 | | | | |
| P18 | Key | LLRGLRN | 2227 | | | | |
| | Key | NYRVAI | 2228 | | | | |
| P21 | Key | XXXXXRGIXNYXXXX | 2229 | | | | |
| | Key | LRNYRV | 2230 | | | | |
| P28 | Key | LRNY | 2231 | | | | |
| P29 | Key | XXXXXRGXXNYXXXI | 2232 | | | | |
| | Preferably | IRNYRVAI | 2233 | | | | |
| | Key | RNYR | 2234 | | | | |
| P30 | Key | SRLLRGLRN | 2235 | | | | |
| | Preferably | IRNYRVAI | 2236 | | | | |
| | Key | NYRV | 2237 | | | | |
| P31 | Key | LLRGLRNYRV | 2238 | | | | |
| | Key | NYRVAI | 2239 | | | | |
| P32 | Key | LRNYRVAI | 2240 | | | | |
| P34 | Key | RLLRGIRN | 2241 | | | | |
| P35 | Key | LRNYRVAI | 2242 | | | | |
| P36 | Key | RLLRGIRNY | 2243 | | | | |
| | Key | RNYRVA | 2244 | | | | |
| P50 | Preferably | SRLLRGLR | 2245 | | | | |
| | Key | SRLLR | 2246 | | | | |
| | Key | LLRGLRNYRV | 2247 | | | | |
| | Key | LRNYRVAI | 2248 | | | | |
| P52 | Key | XXXXLXXIXNYXXXX | 2249 | | | | |
| | Preferably | SRLLRGLRN | 2250 | | | | |
| | Key | SRLLRGLR | 2251 | | | | |
| | More preferably | LLRGLRNYRV | 2252 | | | | |
| | Preferably | RNYRVAI | 2253 | | | | |
| | Key | NYRV | 2254 | | | | |
| P53 | Preferably | LLRGLRNYRV | 2255 | | | | |
| | Key | LRGLRN | 2256 | | | | |
| P55 | Key | SRLLRGLRN | 2257 | | | | |
| | Preferably | LRGLRNYRVA | 2258 | | | | |
| | Key | RNYRV | 2259 | | | | |
| G1 | Key | SRLLR | 2260 | Wheat/barley | 4 | SRLLR | 2919 |
| | Key | LLRGLRNYRV | 2261 | Wheat | 4 | LLRGIRNYRV | 2920 |
| | Key | RNYRVAI | 2262 | Wheat | 4 | RNYRVAI | 2921 |
| G6 | Key | SRLLR | 2263 | | | | |
| | Key | NYRVAI | 2264 | | | | |

E38
Spot No. 13

| | | | | Food in which | | | |
|---|---|---|---|---|---|---|---|
| | | | SEQ ID | cross-reactivity | Graph | | SEQ ID |
| Protein name | Elongation factor 1-alpha Q03033 | | NO | was confirmed | No. | Synthetic sequence | NO |
| 15-residue | LGGIDKRVIERFEKE (positions 31-45 of SEQ | | 2265 | | | | |
| sequences | ID NO: 24) | | | | | | |
| P5 | Key | GGIDKRV | 2266 | | | | |
| | Preferably | KRVIERFEK | 2267 | | | | |
| | Key | ERFEK | 2268 | | | | |
| P7 | Key | LGGLDK | 2269 | | | | |
| | Key | DKRVIERFEK | 2270 | | | | |
| P8 | More preferably | LGGLDKRV | 2271 | | | | |
| | Preferably | GIDKRVIERF | 2272 | | | | |
| | Key | GIDKRV | 2273 | Wheat/barley | 3 | GLDKRV | 2922 |
| | Preferably | DKRVIERFEK | 2274 | | | | |
| | Key | KRVIERFEK | 2275 | Wheat/barley | 3 | KRVLERFEK | 2923 |
| P10 | Key | GGIDK | 2276 | | | | |
| | Key | DKRVIERFEK | 2277 | | | | |
| P14 | Key | LXXXXKXXXXRFXKE | 2278 | | | | |
| | Key | LGGLDK | 2279 | | | | |
| | Preferably | DKRVIERFEK | 2280 | | | | |
| | Key | XKXXXXRFXK | 2281 | | | | |
| P18 | Key | IDKRVIER | 2282 | | | | |
| | Key | ERFEKE | 2283 | | | | |
| P26 | Preferably | LGGLDK | 2284 | | | | |
| | Key | GIDK | 2285 | | | | |
| | Preferably | DKRVIERFEK | 2286 | | | | |
| | Key | KRVIERFEK | 2287 | | | | |
| P27 | Key | KRVIERF | 2288 | | | | |
| P33 | Key | GGIDK | 2289 | | | | |
| | Key | DKRVIERFE | 2290 | | | | |
| P34 | Key | LGGLDK | 2291 | | | | |
| | Preferably | KRVIERFEK | 2292 | | | | |
| | Key | ERFE | 2293 | | | | |
| P50 | More preferably | LGGLDKRVIE | 2294 | | | | |
| | Preferably | LGGLDKRV | 2295 | | | | |
| | Key | GIDK | 2296 | | | | |
| | Key | ERFEK | 2297 | | | | |
| G1 | Key | LXXXXKXXXXRXXKX | 2298 | | | | |
| | Key | GIDK | 2299 | Wheat/rye/ | 4 | GIDK | 2924 |
| | | | | orchard grass | | | |
| | Key | DKRVIERFEK | 2300 | Wheat | 4 | DKRVIERFEK | 2925 |
| G4 | Key | LGGLDK | 2301 | | | | |
| | Key | IDKRVIERFE | 2302 | | | | |
| G7 | Key | LGGLDK | 2303 | | | | |
| | Key | DKRVIERFE | 2304 | | | | |
| G9 | Preferably | LGGLDK | 2305 | | | | |
| | Key | GIDK | 2306 | | | | |
| | Preferably | RVLERFEK | 2307 | | | | |
| | Key | ERFEK | 2308 | | | | |

E39
Spot No. 9

| | | | | Food in which | | | |
|---|---|---|---|---|---|---|---|
| | | | SEQ ID | cross-reactivity | Graph | | SEQ ID |
| Protein name | LMW-GS B2BZD1 | | NO | was confirmed | No. | Synthetic sequence | NO |
| 15-residue | QSRYDAIRAIIYSIV (positions 241-255 of | | 2309 | | | | |
| sequences | SEQ ID NO: 18) | | | | | | |
| P21 | Key | XXRXXXXRAIXYXXX | 2310 | | | | |
| P22 | Key | XXRXDXXRXIXYXXX | 2311 | | | | |
| P25 | Preferably | XXRYDXXRAIIYSXV | 2312 | | | | |
| | Key | XXXXXXXRXIXYXXV | 2313 | | | | |
| | Key | SRYDALR | 2314 | | | | |
| | Key | IIYS | 2315 | | | | |
| P26 | Key | XXXXXXXRAIXYXXX | 2316 | | | | |
| P27 | Preferably | XXRYXXXRAIIYSIX | 2317 | | | | |
| | Key | XXXXXXXRAIXYXXX | 2318 | | | | |
| P29 | Key | XXRXXXXRXIXYXXX | 2319 | | | | |
| P30 | Key | XXRXXXXRAIXYSIV | 2320 | | | | |
| P31 | More preferably | XXRXXXXRAIXYSIV | 2321 | | | | |
| | Preferably | XXRXXXXRAIXYXIX | 2322 | | | | |
| | Key | XXRXXXXRAIXYXXX | 2323 | | | | |
| P33 | Key | XXXXXXXRAIIYSIX | 2324 | | | | |
| P34 | Preferably | XXXXXXXRAIIYSIX | 2325 | | | | |
| | Key | XXXXXXXRXIXYXIX | 2326 | | | | |
| | Key | RYDALRAII | 2327 | | | | |
| | Key | IIYSI | 2328 | | | | |
| P35 | Key | XXXXXXXRAIIYXIX | 2329 | | | | |
| P53 | Key | AIRAI | 2330 | | | | |
| P55 | Preferably | XXRXXXLRAIIYSIV | 2331 | | | | |
| | Key | XXXXXXXRAIIYXIX | 2332 | | | | |
| G1 | Preferably | XXRXXXXRAIIYXIV | 2333 | | | | |
| | Key | XXXXXXXRAIIYXIV | 2334 | | | | |
| G5 | Preferably | XXRXXXXRAIIYSIV | 2335 | | | | |
| | Key | XXXXXXXRAIIYSIX | 2336 | | | | |
| G6 | Preferably | XXRXXXXRAIIYSIX | 2337 | | | | |
| | Key | XXXXXXXRAIXYXIX | 2338 | | | | |
| | Key | AIIYS | 2339 | | | | |
| G8 | Key | XXXXXXXRAIIYXXX | 2340 | | | | |
| G9 | Key | XXXXXXXRAIIYXIX | 2341 | | | | |

E40
Spot No. 4

| | | | | Food in which | | | |
|---|---|---|---|---|---|---|---|
| | | | SEQ ID | cross-reactivity | Graph | | SEQ ID |
| Protein name | Fructose-bisphosphate aldolase W5CCA9 | | NO | was confirmed | No. | Synthetic sequence | NO |
| 15-residue | HDIDRCAYVTEIVLA (positions 183-197 of | | 2342 | | | | |
| sequences | SEQ ID NO: 8) | | | | | | |
| P9 | Key | XDXXXCXYXXXIVLA | 2343 | | | | |
| | Key | HDIDRCAY | 2344 | | | | |
| | More preferably | YVTEIVL | 2345 | | | | |
| | Preferably | YVTEIV | 2346 | | | | |
| | Key | VTEI | 2347 | | | | |
| P12 | Preferably | XXXXRCAYVTXIVLA | 2348 | | | | |
| | Key | XXXXXCXYXXXIVLA | 2349 | | | | |
| | More preferably | YVTEIVL | 2350 | | | | |
| | Preferably | YVTXIVL | 2351 | | | | |
| | Key | YXXXIVL | 2352 | | | | |
| P14 | More preferably | XXXDRCAYVTXIVLA | 2353 | | | | |
| | Preferably | XXXXXCXYVTXIVLA | 2354 | | | | |
| | Key | XXXXXCXYXXXIVLX | 2355 | | | | |
| | Key | YVTEIV | 2356 | | | | |
| P18 | Key | HDIDRCAY | 2357 | | | | |
| | Key | TEIV | 2358 | | | | |
| P21 | More preferably | XXXDRCXYVTXIVLA | 2359 | | | | |
| | Preferably | XXXXXCXYXTXIVLA | 2360 | | | | |
| | Key | XXXXXXXYXXXIVLX | 2361 | | | | |
| | Key | VTEIV | 2362 | | | | |
| P22 | Key | XXXXXXXYXXXXVLA | 2363 | | | | |
| P24 | More preferably | XXXXXCAYVTXIVLA | 2364 | | | | |
| | Preferably | XXXXXCXYVXXIVLA | 2365 | | | | |
| | Key | XXXXXXXYXXXIVLX | 2366 | | | | |
| | Preferably | VTEIV | 2367 | | | | |
| | Key | VTXIV | 2368 | | | | |
| P26 | Preferably | XXXXXCXYXTXIVLA | 2369 | | | | |
| | Key | XXXXXXXYXTXIVLX | 2370 | | | | |
| | Key | HDIDRCAY | 2371 | | | | |
| | Preferably | TEIVL | 2372 | | | | |
| | Key | TEIV | 2373 | | | | |
| P27 | Preferably | XXXDRCAYXTXIVLA | 2374 | | | | |
| | Key | XXXXXCXYXXXIVLA | 2375 | | | | |
| | Preferably | AYVTEIV | 2376 | | | | |
| | Key | YVTEIV | 2377 | | | | |
| P28 | Key | XXXXXCAYXXXIVLX | 2378 | | | | |
| | Key | HDIDRCAY | 2379 | | | | |
| | Key | DRCAYVTEIV | 2380 | | | | |
| P29 | Preferably | XXXXXCXYXTXIVLA | 2381 | | | | |
| | Key | XXXXXXXYXXXIVLX | 2382 | | | | |
| | Key | HDIDRCAY | 2383 | | | | |
| | Preferably | YVTEIVL | 2384 | | | | |
| | Key | VTEI | 2385 | | | | |
| P32 | Preferably | HXXXXCXYXXXIVLA | 2386 | | | | |
| | Key | XXXXXXXYXXXIVLA | 2387 | | | | |
| | Key | RCAYVTEIV | 2388 | | | | |
| P33 | Key | XXXXRCXYVTXIVLA | 2389 | | | | |
| | Key | VTEIV | 2390 | | | | |
| P34 | Preferably | XDIDRCAYVTXIVLA | 2391 | | | | |
| | Key | XXXXRCXYXXXXVLA | 2392 | | | | |
| | Preferably | PHDLDRCAYV | 2393 | | | | |
| | Key | HDIDRCAYV | 2394 | | | | |
| | Key | TEIV | 2395 | | | | |
| P35 | Preferably | XDXXXCXYXXXIVLA | 2396 | | | | |
| | Key | XXXXXCXYXXXXVLX | 2397 | | | | |
| | Preferably | TEIVL | 2398 | | | | |
| | Key | TEIV | 2399 | | | | |
| P36 | Key | XXXDXCXYXTXIVLA | 2400 | | | | |
| | Preferably | VTEIV | 2401 | | | | |
| | Key | TEIV | 2402 | | | | |
| P50 | Preferably | XDIXRCAYXTXIVLA | 2403 | | | | |
| | Key | XDXXXXXYXXXIVLA | 2404 | | | | |
| | More preferably | RCAYVTEIVL | 2405 | | | | |
| | Preferably | TEIVL | 2406 | | | | |
| | Key | TXIVL | 2407 | | | | |
| P52 | More preferably | HDLDRCAYVTXIVLA | 2408 | | | | |
| | Preferably | XDLDRCAYXXXIVLA | 2409 | | | | |
| | Key | XDIXRCXYXXXIVLX | 2410 | | | | |
| | Preferably | TEIVL | 2411 | | | | |
| | Key | TXIVL | 2412 | | | | |
| G7 | Preferably | XXIXXCXYVXXIVLX | 2413 | | | | |
| | Key | XXIXXXXYXXXXVLX | 2414 | | | | |
| | Preferably | LDRCAYV | 2415 | | | | |
| | Key | IXXCXYV | 2416 | | | | |
| | Preferably | RCAYVTEIVL | 2417 | | | | |
| | Key | TEIVL | 2418 | | | | |

E41
Spot No. 4

| | | | | Food in which | | | |
|---|---|---|---|---|---|---|---|
| | | | SEQ ID | cross-reactivity | Graph | | SEQ ID |
| Protein name | Fructose-bisphosphate aldolase W5CCA9 | | NO | was confirmed | No. | Synthetic sequence | NO |
| 15-residue | QSTLKAWSGKTENEE (positions 293-307 of | | 2419 | | | | |
| sequences | SEQ ID NO: 8) | | | | | | |
| P12 | More preferably | XXTXKXWSGKTXXEX | 2420 | | | | |
| | Preferably | XXXXKXWXGKTXXEX | 2421 | | | | |
| | Key | XXXXXXWXGKTXXEX | 2422 | | | | |
| | More preferably | AWSGKTEN | 2423 | | | | |
| | Preferably | AWSGK | 2424 | | | | |
| | Key | NOWSGK | 2425 | | | | |
| P15 | Key | QSTLKXWSGKTXXXX | 2426 | | | | |
| P22 | Key | XXTLKXWXGKTXXXX | 2427 | | | | |
| P24 | Preferably | QSTXKXWXGKTXXXX | 2428 | | | | |
| | Key | XXTXKXXXXKTXXXX | 2429 | | | | |
| P26 | Preferably | QSTLKAWXXKTXNEX | 2430 | | | | |
| | Key | XXXLKAWXXKTXXXX | 2431 | | | | |
| | More preferably | QSTLKAWSGK | 2432 | | | | |
| | Preferably | QSTLKAWXXK | 2433 | | | | |
| | Key | XXXLKAWXXK | 2434 | | | | |
| | Preferably | KAWSGKTEN | 2435 | | | | |
| | Key | WSGKTE | 2436 | | | | |
| P27 | Key | QSTXKAWSGKTXXXX | 2437 | | | | |
| P28 | More preferably | XXXLKAWSGKTXXXX | 2438 | | | | |
| | Preferably | XXXXKAWSGKTXXXX | 2439 | | | | |
| | Key | XXXXXAWXXKTXXXX | 2440 | | | | |
| | Key | KAWSGK | 2441 | | | | |
| P29 | Key | XXXXKXWSGKTXXXX | 2442 | | | | |
| P32 | More preferably | XSTLKAWSGKTXXXX | 2443 | | | | |
| | Preferably | XXXXKAWSGKTXXXX | 2444 | | | | |
| | Key | XXXXXXWSGKTXXXX | 2445 | | | | |
| P33 | Preferably | XSTLKAWXXKTXXXX | 2446 | | | | |
| | Key | XXXXKXWXXKTXXXX | 2447 | | | | |
| P34 | More preferably | QSTLKAWSGKTXXXX | 2448 | | | | |
| | Preferably | XSXLKAWSGKTXXXX | 2449 | | | | |
| | Key | XXXLKAWXGKTXXXX | 2450 | | | | |
| P35 | Preferably | XSXLKAWSXKTENEX | 2451 | | | | |
| | Key | XXXXKXWXXKTXNXX | 2452 | | | | |
| | Preferably | LKAWSGK | 2453 | | | | |
| | Key | LKAWSXK | 2454 | | | | |
| P36 | Preferably | QSTLKAWSGKTXXXX | 2455 | | | | |
| | Key | QSTLKXWSGKTXXXX | 2456 | | | | |
| P50 | More preferably | XXXLKAWXGKTXNXE | 2457 | | | | |
| | Preferably | XXXLKAWXXKTXNXX | 2458 | | | | |
| | Key | XXXLKAWXXKTXXXX | 2459 | | | | |
| | Further preferably | LKAWSGK | 2460 | | | | |
| | More preferably | LKAWSG | 2461 | | | | |
| | Preferably | LKAWXG | 2462 | | | | |
| | Key | LKAWXX | 2463 | | | | |
| | More preferably | WSGKTENEE | 2464 | | | | |
| | Preferably | WXGKTXNXE | 2465 | | | | |
| | Key | WXXKTXNXX | 2466 | | | | |
| P52 | More preferably | QSTLKXWSGKTEXEE | 2467 | | | | |
| | Preferably | XSTLXXWXXKTEXEX | 2468 | | | | |
| | Key | XSXLXXWXXKTEXXX | 2469 | | | | |
| | Preferably | LKAWSGK | 2470 | | | | |
| | Key | LKXWSGK | 2471 | | | | |
| | More preferably | SGKTENEE | 2472 | | | | |
| | Preferably | SGKTEXEE | 2473 | | | | |
| | Key | XXKTEXEX | 2474 | | | | |
| G1 | Preferably | XSTLKAWSGKTXXXX | 2475 | | | | |
| | Key | XXXXKAWXXKTXXXX | 2476 | | | | |
| G2 | More preferably | XSTXXAWSXKTENEX | 2477 | | | | |
| | Preferably | XSXXXAWSXKTENEX | 2478 | | | | |
| | Key | XXXXXAWSXKTXNXX | 2479 | | | | |
| | Key | KAWSG | 2480 | | | | |
| G5 | More preferably | QSTLKAWSGKTXXXX | 2481 | | | | |
| | Preferably | XXXLKAWSGKTXXXX | 2482 | | | | |
| | Key | XXXXKAWSGKTXXXX | 2483 | | | | |
| G6 | Key | QXXLXXXSGKTXXXX | 2484 | | | | |
| G7 | Preferably | QSTXKXWSGKTENEX | 2485 | | | | |
| | Key | XSXXKXWSXKTENXXX | 2486 | | | | |
| | More preferably | KAWSGK | 2487 | | | | |
| | Preferably | KXWSGK | 2488 | | | | |
| | Key | KXWSXK | 2489 | | | | |
| G9 | Key | XXXLKXWXXKTXXXX | 2490 | | | | |

E42
Spot No. 5

| | | | | Food in which | | | |
|---|---|---|---|---|---|---|---|
| | | | SEQ ID | cross-reactivity | Graph | | SEQ ID |
| Protein name | Alpha-gliadin G12-LM2-12 Q1WA40 | | NO | was confirmed | No. | Synthetic sequence | NO |
| 15-residue | SSQVSFQPSQLNPQA (positions 251-265 of | | 2491 | | | | |
| sequences | SEQ ID NO: 10) | | | | | | |
| P2 | More preferably | SSQVSFQPSQ | 2492 | | | | |
| | Preferably | SSQVSF | 2493 | | | | |
| | Key | QVSF | 2494 | | | | |
| | Key | FQPSQLNPQ | 2495 | | | | |
| P7 | Key | XSQXXFXXXQXXXXX | 2496 | | | | |
| | Key | QVSF | 2497 | | | | |
| P8 | Key | SSQVSFXXXXXXXXX | 2498 | | | | |
| | Preferably | SQVSF | 2499 | | | | |
| | Key | QVSF | 2500 | Wheat/rye/barley | 3 | QVSF | 2926 |
| | Key | SFQPSQLNPQ | 2501 | Wheat | 3 | SFQPSQLNPQ | 2927 |
| P15 | Preferably | SSQVSFQPSQ | 2502 | | | | |
| | Key | SSQVSF | 2503 | | | | |
| P16 | Preferably | SSQVSF | 2504 | | | | |
| | Key | SQVSF | 2505 | | | | |
| P20 | Preferably | SSQVSFQPSQ | 2506 | | | | |
| | Key | SQVSF | 2507 | | | | |
| P22 | Key | SQVSF | 2508 | | | | |
| P29 | Key | QVSF | 2509 | | | | |
| | Key | PSQLNPQ | 2510 | | | | |
| P34 | Key | SSXVSXXXXXXXXXX | 2511 | | | | |
| P36 | Key | SQVSF | 2512 | | | | |
| P51 | Key | SXXXXFXXSXLNXXA | 2513 | | | | |
| | Preferably | SFQPSQLNPQ | 2514 | | | | |
| | Key | SFQPSQ | 2515 | | | | |
| P53 | Key | SSQVSF | 2516 | | | | |
| | More preferably | QVSFQPSQLN | 2517 | | | | |
| | Preferably | PSQLNPQ | 2518 | | | | |
| | Key | PSQLN | 2519 | | | | |
| P56 | More preferably | XXXXXFQXSQLNPQA | 2520 | | | | |
| | Preferably | XXXXXFXXSXXNPQA | 2521 | | | | |
| | Key | XXXXXXXXSXXNXQA | 2522 | | | | |
| | Further preferably | PSQLNPQA | 2523 | | | | |
| | More preferably | PSQLNPQ | 2524 | | | | |
| | Preferably | XSQLNPQ | 2525 | | | | |
| | Key | XSXXNPQ | 2526 | | | | |
| G2 | Key | SSXXXFQXXXXNXXX | 2527 | | | | |
| | Key | SSQVSF | 2528 | | | | |
| | More preferably | FQPSQLNPQ | 2529 | | | | |
| | Preferably | FQPSQLNP | 2530 | | | | |
| | Key | FQPSQLN | 2531 | | | | |
| G3 | Preferably | SSQVSFQPSXLXXQX | 2532 | | | | |
| | Key | XSQXXXXPSXLXXXX | 2533 | | | | |
| | More preferably | SSQVSFQPSQ | 2534 | | | | |
| | Preferably | SSQVSFQPSX | 2535 | | | | |
| | Key | XSQXXXXPSX | 2536 | | | | |
| | More preferably | SFQPSQLNPQ | 2537 | | | | |
| | Preferably | SFQPSXLXXQ | 2538 | | | | |
| | Key | XXXPSXLXXX | 2539 | | | | |
| G7 | Key | XXXVSFXXSXLNPXX | 2540 | | | | |
| | Preferably | SSQVSFQPSQ | 2541 | | | | |
| | Key | SSQVSF | 2542 | | | | |
| | Preferably | VSFQPSQLN | 2543 | | | | |
| | Key | VSFXXSXLN | 2544 | | | | |

E43
Spot No. 1

| | | | | Food in which | | | |
|---|---|---|---|---|---|---|---|
| | | | SEQ ID | cross-reactivity | Graph | | SEQ ID |
| Protein name | Alpha/beta-gliadin MM1 P18573 | | NO | was confirmed | No. | Synthetic sequence | NO |
| 15-residue | LQQSTYQLVQQLCCQ (positions 181-195 of | | 2545 | | | | |
| sequences | SEQ ID NO: 2) | | | | | | |
| P2 | More preferably | LQQSTYQLVQ | 2546 | | | | |
| | Preferably | QSTYQLVQQL | 2547 | | | | |
| | Key | QSTY | 2548 | | | | |
| | Key | QLVQQLCC | 2549 | | | | |
| P7 | Key | LXQSTYXLVXXXXXX | 2550 | | | | |
| | More preferably | YQLVQQLCC | 2551 | | | | |
| | Preferably | QLVQQLCC | 2552 | | | | |
| | Key | QLVQ | 2553 | | | | |
| P20 | Key | LQQSTYQLVQ | 2554 | | | | |
| | Key | QSTYQLVQQL | 2555 | | | | |
| | Key | QLVQQLCC | 2556 | | | | |
| P21 | Key | XXXXTYXLXXXLXXX | 2557 | | | | |
| | Key | QSTYQLVQQL | 2558 | | | | |
| | Key | LVQQLCC | 2559 | | | | |
| P22 | Key | LQQSTYQLVQ | 2560 | | | | |
| | Key | LVQQL | 2561 | | | | |
| P24 | More preferably | QSTYQLVQQL | 2562 | | | | |
| | Preferably | QLVQQLCC | 2563 | | | | |
| | Key | QLVQQ | 2564 | | | | |
| P25 | Key | QSTYQLVQ | 2565 | | | | |
| | Key | YQLVQQLCC | 2566 | | | | |
| P26 | Key | QLVQQ | 2567 | | | | |
| P27 | Key | XXXSTYQLVXXLXCX | 2568 | | | | |
| | Preferably | QLVQQL | 2569 | | | | |
| | Key | QLVQQ | 2570 | | | | |
| P28 | Preferably | XQQSTYQLVXXLXCX | 2571 | | | | |
| | Key | XXXSXYQLVXXXXXX | 2572 | | | | |
| | More preferably | YQLVQQL | 2573 | | | | |
| | Preferably | QLVQQL | 2574 | | | | |
| | Key | QLVQ | 2575 | | | | |
| P29 | Preferably | XXXSTYQLXXXXXCX | 2576 | | | | |
| | Key | XXXSTYQLXXXXXXX | 2577 | | | | |
| | Key | YQLVQQL | 2578 | | | | |
| P30 | Key | YQLVQQ | 2579 | | | | |
| P31 | Preferably | XQXSTYQLVXXXXCX | 2580 | | | | |
| | Key | XXXXTYXLVXXXXXX | 2581 | | | | |
| | More preferably | YQLVQQL | 2582 | | | | |
| | Preferably | QLVQQ | 2583 | | | | |
| | Key | QLVQ | 2584 | | | | |
| P32 | Preferably | LQQSTYQLVQ | 2585 | | | | |
| | Key | LQQSTYQL | 2586 | | | | |
| | Preferably | QLVQQLCC | 2587 | | | | |
| | Key | QQLC | 2588 | | | | |
| P34 | More preferably | QSTYQLVQQL | 2589 | | | | |
| | Preferably | QLVQQLCC | 2590 | | | | |
| | Key | QLVQQL | 2591 | | | | |
| P35 | Preferably | YQLVQQ | 2592 | | | | |
| | Key | QLVQ | 2593 | | | | |
| P36 | Preferably | QLVQQL | 2594 | | | | |
| | Key | VQQL | 2595 | | | | |
| P53 | Key | XXXSXYXXXXXLXCX | 2596 | | | | |
| | Key | QQSTYQLV | 2597 | | | | |
| | More preferably | YQLVQQLCC | 2598 | | | | |
| | Preferably | QLVQQLCC | 2599 | | | | |
| | Key | QQLC | 2600 | | | | |
| | Preferably | QQSTYQLVQ | 2601 | | | | |
| P54 | Key | QQSTYQLV | 2602 | | | | |
| | Key | QLVQQLC | 2603 | | | | |
| | Preferably | YQLVQ | 2604 | | | | |
| G3 | Key | QLVQ | 2605 | | | | |
| G5 | Key | QLVQQL | 2606 | | | | |
| G6 | Key | LQQSTYQLVQ | 2607 | | | | |
| | Key | QLVQQL | 2608 | | | | |
| G7 | Key | QLVQQLCC | 2609 | | | | |
| G9 | Key | LQQSTYQLV | 2610 | | | | |
| | Key | QSTYQLVQQL | 2611 | | | | |
| | Key | QLVQQLCC | 2612 | | | | |

E44
Spot No. 11, 12

| | | | | Food in which | | | |
|---|---|---|---|---|---|---|---|
| | | | SEQ ID | cross-reactivity | Graph | | SEQ ID |
| Protein name | Globulin 3 B7U6L4 | | NO | was confirmed | No. | Synthetic sequence | NO |
| 15-residue | SAKPLLASLSKRVLT (positions 261-275 of | | 2613 | | | | |
| sequences | SEQ ID NO: 22) | | | | | | |
| P2 | Key | AKPLL | 2614 | | | | |
| | Key | SLSKRV | 2615 | | | | |
| P24 | Key | AKPLL | 2616 | | | | |
| | Key | SKRV | 2617 | | | | |
| P32 | Key | XXXXXLASLSKXXLX | 2618 | | | | |
| | Key | LASLSK | 2619 | | | | |
| G2 | Key | XXXXXXXXLSXRXLX | 2620 | | | | |
| | Key | LLAS | 2621 | | | | |
| G3 | Key | SXXXXLAXXXXXVLX | 2622 | | | | |
| | Preferably | SAKPLL | 2623 | | | | |
| | Key | AKPLL | 2624 | | | | |
| | Preferably | ASLSKRV | 2625 | | | | |
| | Key | LSKRV | 2626 | | | | |
| G7 | Key | LLASLSKRV | 2627 | | | | |
| G9 | Preferably | XXXXLLASLSKXXXX | 2628 | | | | |
| | Key | XXXXLLAXLSKXXXX | 2629 | | | | |
| | Key | LASLSK | 2630 | | | | |

E45
Spot No. 13

| | | | | Food in which | | | |
|---|---|---|---|---|---|---|---|
| | | | SEQ ID | cross-reactivity | Graph | | SEQ ID |
| Protein name | Elongation factor 1-alpha Q03033 | | NO | was confirmed | No. | Synthetic sequence | NO |
| 15-residue | RFEKEAAEMNKRSFK (positions 41-45 of | | 2631 | | | | |
| sequences | SEQ ID NO: 24) | | | | | | |
| P7 | Key | XXXKXXAEMXXXXXX | 2632 | | | | |
| | Preferably | KEAAEM | 2633 | | | | |
| | Key | EAAE | 2634 | | | | |
| P10 | Preferably | XXXKEXAEMNXXXXX | 2635 | | | | |
| | Key | XXXKEXAEMXXXXXX | 2636 | | | | |
| | Preferably | KEAAEM | 2637 | | | | |
| | Key | EAAE | 2638 | | | | |
| P14 | Key | XXXKXXXXXNKRXXX | 2639 | | | | |
| | Preferably | RFEKEAAEMN | 2640 | | | | |
| | Key | KEAAEM | 2641 | | | | |
| P16 | Key | KEAAEM | 2642 | | | | |
| P20 | Preferably | KEAAEMN | 2643 | | | | |
| | Key | KEXAEXN | 2644 | | | | |
| P22 | Key | XXXKEXAEXNKRXXX | 2645 | | | | |
| | Key | KEAAEMN | 2646 | | | | |
| P26 | Key | KEAAEM | 2647 | | | | |
| | Key | NKRSFK | 2648 | | | | |
| P29 | Preferably | KEAAE | 2649 | | | | |
| | Key | KEXAE | 2650 | | | | |
| P31 | Key | RXEKEXAEMXXXXXX | 2651 | | | | |
| | Preferably | KEAAEM | 2652 | | | | |
| | Key | EAAE | 2653 | | | | |
| P32 | Key | XXXKEAAEMNXXXXX | 2654 | | | | |
| | Preferably | EAAEMNK | 2655 | | | | |
| | Key | EAAEXNX | 2656 | | | | |
| P35 | Key | XXEXXXXXXNKRXXX | 2657 | | | | |
| | Key | FEKEAAE | 2658 | | | | |
| | Preferably | EAAEMNKRSF | 2659 | | | | |
| | Key | EMNKRSF | 2660 | | | | |
| P50 | Preferably | RFEKEAAXXNXRXXK | 2661 | | | | |
| | Key | XFEKXXAXXNXRXXX | 2662 | | | | |
| | Preferably | FEKEAA | 2663 | | | | |
| | Key | FEKEA | 2664 | | | | |
| P57 | Preferably | RFEKEXAEMNXRXFK | 2665 | | | | |
| | Key | XXEKEXAXMXXXXFX | 2666 | | | | |
| | More preferably | RFEKEAAEMN | 2667 | | | | |
| | Preferably | KEAAE | 2668 | | | | |
| | Key | KEXAE | 2669 | | | | |
| G5 | Key | RFEKEXXXXXXXXXX | 2670 | | | | |
| | Key | AEMNKRSFK | 2671 | | | | |
| G7 | Key | RFEKEAAEMN | 2672 | | | | |
| | Key | EAAEMNKR | 2673 | | | | |

E46
Spot No. 13

| | | | | Food in which | | | |
|---|---|---|---|---|---|---|---|
| | | | SEQ ID | cross-reactivity | Graph | | SEQ ID |
| Protein name | Elongation factor 1-alpha Q03033 | | NO | was confirmed | No. | Synthetic sequence | NO |
| 15-residue | YKGPTLLEALDQINE (positions 211-225 of | | 2674 | | | | |
| sequences | SEQ ID NO: 24) | | | | | | |
| P4 | Key | YXXXXLXXXXXQINX | 2675 | | | | |
| P8 | Key | YKGPTL | 2676 | Wheat/barley | 3 | YKGPTL | 2928 |
| P12 | Key | YKGPTL | 2677 | | | | |
| P14 | Key | YXXPXLXXXXXQXXX | 2678 | | | | |
| | Key | YKGPTL | 2679 | | | | |
| P17 | Key | YKGPTL | 2680 | | | | |
| P22 | Key | YKGPTLXXXXXXXXX | 2681 | | | | |
| | Preferably | YKGPTL | 2682 | | | | |
| | Key | KGPTL | 2683 | | | | |
| P26 | Key | YKGPTL | 2684 | | | | |
| P27 | Preferably | YKGPTL | 2685 | | | | |
| | Key | YKXPXL | 2686 | | | | |
| P28 | Key | YKXPXXXXXXXQXNX | 2687 | | | | |
| P29 | Key | YKGPTL | 2688 | | | | |
| P30 | Key | YKGPTL | 2689 | | | | |
| P31 | Preferably | YKGPXXXXALDQXXX | 2690 | | | | |
| | Key | YKXXXXXXALXQXXX | 2691 | | | | |
| P33 | Key | YKGPTL | 2692 | | | | |
| P34 | Key | YKGPTL | 2693 | | | | |
| P35 | Key | YKGPTL | 2694 | | | | |
| P36 | Key | YKGPTL | 2695 | | | | |
| G3 | Key | YKGPTL | 2696 | | | | |
| G6 | Key | YKGPTL | 2697 | | | | |
| G7 | Key | KGPTL | 2698 | | | | |
| G8 | Key | YKGPTL | 2699 | | | | |
| G9 | Key | YKGPTL | 2700 | | | | |

E47
Spot No. 13

| | | | | Food in which | | | |
|---|---|---|---|---|---|---|---|
| | | | SEQ ID | cross-reactivity | Graph | | SEQ ID |
| Protein name | Elongation factor 1-alpha Q03033 | | NO | was confirmed | No. | Synthetic sequence | NO |
| 15-residue | VYKIGGIGTVPVGRV (positions 241-255 of | | 2701 | | | | |
| sequences | SEQ ID NO: 24) | | | | | | |
| P3 | More preferably | YKIGGIGTVP | 2702 | | | | |
| | Preferably | YKIGGIGTV | 2703 | | | | |
| | Key | YKIGGI | 2704 | | | | |
| P8 | More preferably | YKIGGIGTVP | 2705 | | | | |
| | Preferably | YKIGGIGTV | 2706 | | | | |
| | Key | YKIGGIGT | 2707 | Wheat/barley | 3 | YKIGGIGT | 2929 |
| P16 | More preferably | YKIGGIGTV | 2708 | | | | |
| | Preferably | YKIGGIGT | 2709 | | | | |
| | Key | YKIGG | 2710 | | | | |
| P17 | More preferably | YKIGGIGT | 2711 | | | | |
| | Preferably | YKIGG | 2712 | | | | |
| | Key | KIGG | 2713 | | | | |
| | Key | GIGTVPVGRV | 2714 | | | | |
| P18 | More preferably | YKIGGIGTV | 2715 | | | | |
| | Preferably | YKIGGI | 2716 | | | | |
| | Key | YKIGG | 2717 | | | | |
| | Key | GIGTVPVGRV | 2718 | | | | |
| P25 | Key | YKIGG | 2719 | | | | |
| | Preferably | IGGIGTVPVG | 2720 | | | | |
| | Key | GIGTVPVG | 2721 | | | | |
| P26 | Preferably | YKIGG | 2722 | | | | |
| | Key | KIGG | 2723 | | | | |
| | Key | GIGTVPVGRV | 2724 | | | | |
| P27 | Preferably | YKIGG | 2725 | | | | |
| | Key | KIGG | 2726 | | | | |
| | Key | GIGTVPVGR | 2727 | | | | |
| P28 | Key | XYXXXXXXXXXVGRX | 2728 | | | | |
| | More preferably | YKIGGIGTVP | 2729 | | | | |
| | Preferably | YKIGGIGTV | 2730 | | | | |
| | Key | YKIGGI | 2731 | | | | |
| P29 | More preferably | YKIGGIGTVP | 2732 | | | | |
| | Preferably | YKIGGI | 2733 | | | | |
| | Key | YKIGG | 2734 | | | | |
| | Key | GIGTVPVGRV | 2735 | | | | |
| P30 | Preferably | YKIGGIGTVP | 2736 | | | | |
| | Key | KIGG | 2737 | | | | |
| | Key | VPVGR | 2738 | | | | |
| P31 | Preferably | YKIGGIG | 2739 | | | | |
| | Key | KIGGI | 2740 | | | | |
| | Key | GIGTVPVGRV | 2741 | | | | |
| P33 | Preferably | YKIGGIGTVP | 2742 | | | | |
| | Key | YKIGGIGTV | 2743 | | | | |
| P34 | Key | XYKXGXXXXXXVXXX | 2744 | | | | |
| | Preferably | KIGGIG | 2745 | | | | |
| | Key | KIGGI | 2746 | | | | |
| P35 | More preferably | YKIGGIGT | 2747 | | | | |
| | Preferably | YKIGG | 2748 | | | | |
| | Key | KIGG | 2749 | | | | |
| P36 | Preferably | YKIGGIGTV | 2750 | | | | |
| | Key | KIGG | 2751 | | | | |
| P52 | Preferably | YKIGGIGTVP | 2752 | | | | |
| | Key | YKIGGIGTV | 2753 | | | | |
| P53 | More preferably | YKIGGIGTV | 2754 | | | | |
| | Preferably | KIGGIGTV | 2755 | | | | |
| | Key | KIGGIGT | 2756 | | | | |
| P55 | Preferably | YKIGGIGTVP | 2757 | | | | |
| | Key | YKIGGIGTV | 2758 | | | | |
| G3 | Preferably | YKIGGIGTVP | 2759 | | | | |
| | Key | YKIGGIGTV | 2760 | | | | |
| G4 | Preferably | VYKIGGIGTV | 2761 | | | | |
| | Key | YKIGGIGTV | 2762 | | | | |
| G6 | Preferably | YKIGGIGTV | 2763 | | | | |
| | Key | KIGG | 2764 | | | | |
| | Key | VPVGR | 2765 | | | | |
| G7 | Preferably | YKIGGIG | 2766 | | | | |
| | Key | KIGG | 2767 | | | | |
| | Key | VPVGRV | 2768 | | | | |
| G8 | Preferably | YKIGGIGTV | 2769 | | | | |
| | Key | YKIGG | 2770 | | | | |
| G9 | Preferably | YKIGGIG | 2771 | | | | |
| | Key | YKIGG | 2772 | | | | |
| | Key | IGTVPVGRV | 2773 | | | | |

E48
Spot No. 13

| | | | | Food in which | | | |
|---|---|---|---|---|---|---|---|
| | | | SEQ ID | cross-reactivity | Graph | | SEQ ID |
| Protein name | Elongation factor 1-alpha Q03033 | | NO | was confirmed | No. | Synthetic sequence | NO |
| 15-residue | FLKNGDAGIVKMIPT (positions 381-395 of | | 2774 | | | | |
| sequences | SEQ ID NO: 24) | | | | | | |
| P5 | Preferably | KNGDA | 2775 | | | | |
| | Key | KNGD | 2776 | | | | |
| P8 | More preferably | KNGDAGIVKM | 2777 | | | | |
| | Preferably | DAGIVKMLP | 2778 | | | | |
| | Key | AGIVK | 2779 | Wheat/rye/barley | 3 | AGIVK | 2930 |
| P14 | Preferably | LKNGDAG | 2780 | | | | |
| | Key | KNGD | 2781 | | | | |
| P16 | Key | XXXXXXXXXXKMIPT | 2782 | | | | |
| | Preferably | FLKNGDAG | 2783 | | | | |
| | Key | LKNGD | 2784 | | | | |
| P22 | Key | XXXXXXXXXXXMIPT | 2785 | | | | |
| P27 | Key | XXXXXXXGXXKMXPT | 2786 | | | | |
| | Preferably | LKNGD | 2787 | | | | |
| | Key | KNGD | 2788 | | | | |
| P29 | Key | XXXXXXXGXXKMIPT | 2789 | | | | |
| P33 | Key | LKNGDAGIVK | 2790 | | | | |
| | Preferably | VKMIPT | 2791 | | | | |
| | Key | XKMIPT | 2792 | | | | |
| P34 | Preferably | LKNGDAG | 2793 | | | | |
| | Key | KNGD | 2794 | | | | |
| P35 | Preferably | LKNGD | 2795 | | | | |
| | Key | KNGD | 2796 | | | | |
| P36 | Key | LKNGD | 2797 | | | | |
| P50 | Preferably | LKNGD | 2798 | | | | |
| | Key | KNGD | 2799 | | | | |
| P51 | Key | KNGD | 2800 | | | | |
| P53 | Key | KNGD | 2801 | | | | |
| G1 | Key | VKMIPT | 2802 | Wheat/rye/barley | 4 | VKMIPT | 2931 |
| G5 | Preferably | KNGDAG | 2803 | | | | |
| | Key | NGDAG | 2804 | | | | |
| G6 | Key | XXXXXXXXXXKMIPT | 2805 | | | | |
| G7 | Key | VKMIPT | 2806 | | | | |
| G9 | Preferably | KNGDAG | 2807 | | | | |
| | Key | KNGD | 2808 | | | | |

E49
Spot No. 10

| | | | | Food in which | | | |
|---|---|---|---|---|---|---|---|
| | | | SEQ ID | cross-reactivity | Graph | | SEQ ID |
| Protein name | Globulin-1 S allele M8B8C6 | | NO | was confirmed | No. | Synthetic sequence | NO |
| 15-residue | VYSANTHRSKWFRVV (positions 121-135 of | | 2809 | | | | |
| sequences | SEQ ID NO: 20) | | | | | | |
| P16 | Key | XYXXXXXRSXWXXXX | 2810 | | | | |
| | Key | SANTH | 2811 | | | | |
| P22 | Key | XXXXXXXRSKWXXXX | 2812 | | | | |
| P24 | Key | XYXXNXXXSXWXXXX | 2813 | | | | |
| | Key | SANTH | 2814 | | | | |
| P27 | Key | NTHR | 2815 | | | | |
| P31 | Key | XXXXNTHXSXWFRXX | 2816 | | | | |
| | Preferably | SANTHR | 2817 | | | | |
| | Key | SANTH | 2818 | | | | |
| | Key | KWFRV | 2819 | | | | |
| P33 | Key | XYXXNTXRSXWXXXX | 2820 | | | | |
| | Key | SANTH | 2821 | | | | |
| P53 | Key | SANTHR | 2822 | | | | |
| | Key | NTHRSKWFRV | 2823 | | | | |
| P55 | Key | VYSAXXXRXXXXXXX | 2824 | | | | |
| | Preferably | YSANTH | 2825 | | | | |
| | Key | SANT | 2826 | | | | |
| G6 | Key | XXXANTHXXXWFXXX | 2827 | | | | |
| | Preferably | SANTHRSKW | 2828 | | | | |
| | Key | XANTHXXXW | 2829 | | | | |

E50
Spot No. 10

| | | | | Food in which | | | |
|---|---|---|---|---|---|---|---|
| | | | SEQ ID | cross-reactivity | Graph | | SEQ ID |
| Protein name | Globulin-1 S allele M8B8C6 | | NO | was confirmed | No. | Synthetic sequence | NO |
| 15-residue | YIVVEGRDGYFEMAC (positions 291-305 of | | 2830 | | | | |
| sequences | SEQ ID NO: 20) | | | | | | |
| P8 | Key | YXXVXGRDGXFXXXX | 2831 | | | | |
| | Key | YIVVEG | 2832 | Wheat | 3 | YIVVEG | 2932 |
| | Preferably | EGRDGYFEM | 2833 | | | | |
| | Key | XGRDGXFXX | 2834 | | | | |
| P9 | Key | YXVVXGXDGXXXXXX | 2835 | | | | |
| | Key | IVVEG | 2836 | | | | |
| | Key | EGRDGYFEM | 2837 | | | | |
| P21 | Key | IVVEG | 2838 | | | | |
| | Key | EGRDGYFEM | 2839 | | | | |
| P22 | Key | YIVVEXRDXXXXXXX | 2840 | | | | |
| P24 | Key | YXXVEXRDGXFXXXX | 2841 | | | | |
| | Preferably | YIVVEG | 2842 | | | | |
| | Key | IVVEG | 2843 | | | | |
| | Key | EGRDGYFEM | 2844 | | | | |
| P26 | Preferably | YIVVEG | 2845 | | | | |
| | Key | IVVEG | 2846 | | | | |
| | Preferably | EGRDGYFEMA | 2847 | | | | |
| | Key | EGRDGYFEM | 2848 | | | | |
| P27 | Key | YIXVEGRDGYFXXXX | 2849 | | | | |
| | Key | IVVEG | 2850 | | | | |
| | Key | EGRDGYFEM | 2851 | | | | |
| P31 | Key | IVVEG | 2852 | | | | |
| | Key | EGRDGYFEM | 2853 | | | | |
| P32 | Key | YXVVXXRDGXFXXXX | 2854 | | | | |
| P33 | Key | YXXXXXRXGXFXXXX | 2855 | | | | |
| P34 | Key | IVVEG | 2856 | | | | |
| | Key | EGRDGYFEM | 2857 | | | | |
| P35 | Key | YXXXVXGXDXXXXXX | 2858 | | | | |
| P50 | More preferably | YXXXXGRDGYFEMAX | 2859 | | | | |
| | Preferably | YXXXXGRDGYFXMAX | 2860 | | | | |
| | Key | YXXXXGRXGYFXXAX | 2861 | | | | |
| | Key | IVVEG | 2862 | | | | |
| | Key | VEGRDGYFEM | 2863 | | | | |
| P52 | Key | IVVEG | 2864 | | | | |
| | Key | EGRDGYFEM | 2865 | | | | |
| P53 | Key | YXXXXXRXGXFXXXC | 2866 | | | | |
| | Key | YIVVEGRDG | 2867 | | | | |
| | Key | EGRDGYFE | 2868 | | | | |
| P55 | Preferably | YIXVXXRDGXFXXAX | 2869 | | | | |
| | Key | YXXXXXRDGXFXXXX | 2870 | | | | |
| | Key | VVEGR | 2871 | | | | |
| | More preferably | EGRDGYFEMA | 2872 | | | | |
| | Preferably | XXRDGXFXXA | 2873 | | | | |
| | Key | XXRDGXFXXX | 2874 | | | | |
| G6 | Key | VVEG | 2875 | | | | |
| G7 | Key | YIVVEXXXXXFEXXX | 2876 | | | | |
| | Key | VVEG | 2877 | | | | |
| G8 | Key | IVVEG | 2878 | | | | |
| | Key | EGRDGYFEM | 2879 | | | | |

[0280] In Table 2, WDEIA cases in wheat-allergic patients are represented by P2 to P36, children of cases with general immediate type allergy to wheat, which requires no exercise for its development, are represented by P50 to P57, and adults are represented by G1 to G9.

[0281] The present invention provides polypeptides comprising the amino acid sequences defined in (E1) to (E50), which comprise or consist of the amino acid sequences of SEQ ID NOs: 29-2932 (except for SEQ ID NOs: 138, 227, 259, 269, 273, 342, 399 and 2894) described in Table 2 mentioned later as polypeptides comprising an amino acid sequence specifically binding to an IgE antibody from an allergic patient. The polypeptides (E1) to (E50) each have an amino acid sequence (hereinafter also referred to as an “epitope”) binding to an IgE antibody derived from a protein described in “Origin” of Table 2.
[0282] (1) Alpha/beta-gliadin MM1 protein-derived: (E9), (E31), (E11), (E36) and (E43);
[0283] (2) LMW-m glutenin subunit 8 protein-derived: (E2), (E13) and (E21);
[0284] (3) Gamma-gliadin P08453 protein-derived: (E14), (E24), (E5) and (E25);
[0285] (4) Fructose-bisphosphate aldolase protein-derived: (E33), (E20), (E34), (E10), (E15), (E6), (E16), (E40), (E30) and (E41);
[0286] (5) Alpha-gliadin Gli2-LM2-12 protein-derived: (E9), (E31), (E11), (E17), (E7), (E22) and (E42);
[0287] (6) Alpha-gliadin (Fragment) A0A0E3Z522 protein-derived: (E9), (E31), (E11), (E36) and (E35);
[0288] (7) Gamma-gliadin A1 protein-derived: (E4) and (E19);
[0289] (8) Alpha/beta-gliadin I0IT53 protein-derived: (E23) and (E12);
[0290] (9) LMW-D8 (LMW-GS) protein-derived: (E8), (E1), (E18), (E3) and (E39);
[0291] (10) Globulin 1-S allele 1 protein-derived: (E49) and (E50);
[0292] (11) Globulin 3 protein-derived: (E49) and (E50);
[0293] (12) Elongation factor 1-alpha protein-derived: (E38), (E45), (E28), (E26), (E46), (E47), (E27), (E29), (E48) and (E32);
[0294] (13) Alpha-gliadin (Fragment) A0A0E3UR64 protein-derived: (E23), (E11) and (E36); and
[0295] (14) Gamma-gliadin I7KM78 protein-derived.

[0296] The amino acid sequences defined in (E9) and (E31) are the same sequences. The amino acid sequences defined in (E9) and (E31) are present in 3 types of proteins as defined in (1), (5) and (6). The amino acid sequence defined in (E11) is present in 4 types of proteins as defined in (1), (5), (6) and (13). The amino acid sequence defined in (E23) is present in 2 types of proteins as defined in (8) and (13). The amino acid sequence defined in (E36) is present in 3 types of proteins as defined in (1), (6) and (13).

[0297] The epitope antigen of the present invention is not limited and preferably comprises at least one of the following polypeptides:
[0298] (E1) a polypeptide comprising at least one amino acid sequence selected from the amino acid sequences of SEQ ID NOs: 29-130 and 2880;
[0299] (E2) a polypeptide comprising at least one amino acid sequence selected from the amino acid sequences of SEQ ID NOs: 131-137 and 139-190;
[0300] (E3) a polypeptide comprising at least one amino acid sequence selected from the amino acid sequences of SEQ ID NOs: 191-280 (except for 227, 259, 269 and 273) and 2881;
[0301] (E4) a polypeptide comprising at least one amino acid sequence selected from the amino acid sequences of SEQ ID NOs: 281-341 and 343-345;
[0302] (E5) a polypeptide comprising at least one amino acid sequence selected from the amino acid sequences of SEQ ID NOs: 346-398, 400-413 and 2882;
[0303] (E6) a polypeptide comprising at least one amino acid sequence selected from the amino acid sequences of SEQ ID NOs: 414-492, 2883 and 2884;
[0304] (E7) a polypeptide comprising at least one amino acid sequence selected from the amino acid sequences of SEQ ID NOs: 493-561;
[0305] (E8) a polypeptide comprising at least one amino acid sequence selected from the amino acid sequences of SEQ ID NOs: 562-639;
[0306] (E9) a polypeptide comprising at least one amino acid sequence selected from the amino acid sequences of SEQ ID NOs: 640-705 and 2885-2888;
[0307] (E10) a polypeptide comprising at least one amino acid sequence selected from the amino acid sequences of SEQ ID NOs: 706-775 and 2889-2891;
[0308] (E11) a polypeptide comprising at least one amino acid sequence selected from the amino acid sequences of SEQ ID NOs: 776-898 and 2892;
[0309] (E12) a polypeptide comprising at least one amino acid sequence selected from the amino acid sequences of SEQ ID NOs: 899-973, 2893 and 2895;
[0310] (E13) a polypeptide comprising at least one amino acid sequence selected from the amino acid sequences of SEQ ID NOs: 974-1009;
[0311] (E14) a polypeptide comprising at least one amino acid sequence selected from the amino acid sequences of SEQ ID NOs: 1010-1088 and 2896-2899;
[0312] (E15) a polypeptide comprising at least one amino acid sequence selected from the amino acid sequences of SEQ ID NOs: 1089-1141;
[0313] (E16) a polypeptide comprising at least one amino acid sequence selected from the amino acid sequences of SEQ ID NOs: 1142-1165 and 2900;
[0314] (E17) a polypeptide comprising at least one amino acid sequence selected from the amino acid sequences of SEQ ID NOs: 1166-1208;
[0315] (E18) a polypeptide comprising at least one amino acid sequence selected from the amino acid sequences of SEQ ID NOs: 1209-1256;
[0316] (E19) a polypeptide comprising at least one amino acid sequence selected from the amino acid sequences of SEQ ID NOs: 1257-1296;
[0317] (E20) a polypeptide comprising at least one amino acid sequence selected from the amino acid sequences of SEQ ID NOs: 1297-1366;
[0318] (E21) a polypeptide comprising at least one amino acid sequence selected from the amino acid sequences of SEQ ID NOs: 1367-1402;
[0319] (E22) a polypeptide comprising at least one amino acid sequence selected from the amino acid sequences of SEQ ID NOs: 1403-1507;
[0320] (E23) a polypeptide comprising at least one amino acid sequence selected from the amino acid sequences of SEQ ID NOs: 1508-1565 and 2901;
[0321] (E24) a polypeptide comprising at least one amino acid sequence selected from the amino acid sequences of SEQ ID NOs: 1566-1597;
[0322] (E25) a polypeptide comprising at least one amino acid sequence selected from the amino acid sequences of SEQ ID NOs: 1598-1607;
[0323] (E26) a polypeptide comprising at least one amino acid sequence selected from the amino acid sequences of SEQ ID NOs: 1608-1684, 2902 and 2903;
[0324] (E27) a polypeptide comprising at least one amino acid sequence selected from the amino acid sequences of SEQ ID NOs: 1685-1752, 2904 and 2905;
[0325] (E28) a polypeptide comprising at least one amino acid sequence selected from the amino acid sequences of SEQ ID NOs: 1753-1788, 2906 and 2907;
[0326] (E29) a polypeptide comprising at least one amino acid sequence selected from the amino acid sequences of SEQ ID NOs: 1789-1835, 2908 and 2909;
[0327] (E30) a polypeptide comprising at least one amino acid sequence selected from the amino acid sequences of SEQ ID NOs: 1836-1894, 2910 and 2911;
[0328] (E31) a polypeptide comprising at least one amino acid sequence selected from the amino acid sequences of SEQ ID NOs: 1895-1976, 2912 and 2913;
[0329] (E32) a polypeptide comprising at least one amino acid sequence selected from the amino acid sequences of SEQ ID NOs: 1977-2003;
[0330] (E33) a polypeptide comprising at least one amino acid sequence selected from the amino acid sequences of SEQ ID NOs: 2004-2026;
[0331] (E34) a polypeptide comprising at least one amino acid sequence selected from the amino acid sequences of SEQ ID NOs: 2027-2067 and 2914;
[0332] (E35) a polypeptide comprising at least one amino acid sequence selected from the amino acid sequences of SEQ ID NOs: 2068-2153, 2915 and 2916;
[0333] (E36) a polypeptide comprising at least one amino acid sequence selected from the amino acid sequences of SEQ ID NOs: 2154-2216;
[0334] (E37) a polypeptide comprising at least one amino acid sequence selected from the amino acid sequences of SEQ ID NOs: 2217-2264 and 2917-2921;
[0335] (E38) a polypeptide comprising at least one amino acid sequence selected from the amino acid sequences of SEQ ID NOs: 2265-2308 and 2922-2925;
[0336] (E39) a polypeptide comprising at least one amino acid sequence selected from the amino acid sequences of SEQ ID NOs: 2309-2341;
[0337] (E40) a polypeptide comprising at least one amino acid sequence selected from the amino acid sequences of SEQ ID NOs: 2342-2418;
[0338] (E41) a polypeptide comprising at least one amino acid sequence selected from the amino acid sequences of SEQ ID NOs: 2419-2490;
[0339] (E42) a polypeptide comprising at least one amino acid sequence selected from the amino acid sequences of SEQ ID NOs: 2491-2544, 2926 and 2927;
[0340] (E43) a polypeptide comprising at least one amino acid sequence selected from the amino acid sequences of SEQ ID NOs: 2545-2612;
[0341] (E44) a polypeptide comprising at least one amino acid sequence selected from the amino acid sequences of SEQ ID NOs: 2613-2630;
[0342] (E45) a polypeptide comprising at least one amino acid sequence selected from the amino acid sequences of SEQ ID NOs: 2631-2673;
[0343] (E46) a polypeptide comprising at least one amino acid sequence selected from the amino acid sequences of SEQ ID NOs: 2674-2700 and 2928;
[0344] (E47) a polypeptide comprising at least one amino acid sequence selected from the amino acid sequences of SEQ ID NOs: 2701-2773 and 2929;
[0345] (E48) a polypeptide comprising at least one amino acid sequence selected from the amino acid sequences of SEQ ID NOs: 2774-2808, 2930 and 2931;
[0346] (E49) a polypeptide comprising at least one amino acid sequence selected from the amino acid sequences of SEQ ID NOs: 2809-2829; and
[0347] (E50) a polypeptide comprising at least one amino acid sequence selected from the amino acid sequences of SEQ ID NOs: 2830-2879 and 2932.

[0348] As described in Table 2, the polypeptides (E1) to (E50) mentioned above as a preferred embodiment have a specific sequence identified as an epitope binding to an IgE antibody in Examples herein. The epitope antigen of the present invention may include variants described below, etc., in addition to the aforementioned polypeptides (E1) to (E50) according to a preferred embodiment. Hereinafter, the forms (variants) that may be included in the epitope antigen of the present invention will be described.

[0349] 50 types of sequences, i.e., SEQ ID NOs: 29, 131, 191, 281, 346, 414, 493, 562, 640, 706, 776, 899, 974, 1010, 1089, 1142, 1166, 1209, 1257, 1297, 1367, 1403, 1508, 1566, 1598, 1608, 1685, 1753, 1789, 1836, 1895, 1977, 2004, 2027, 2068, 2154, 2217, 2265, 2309, 2342, 2419, 2491, 2545, 2613, 2631, 2674, 2701, 2774, 2809 and 2830, described in “Common 15-residue sequence” of Table 2 are common sequences of 15 amino acid residues identified as epitopes binding to IgE antibodies for the epitopes of the polypeptides (E1) to (E50) by epitope mapping based on overlapping. In one embodiment, the present invention provides polypeptides comprising these amino acid sequences or consisting of these amino acid sequences. The epitope sequence contained in the polypeptide of the present invention can be all the 15 amino acid residues of this common epitope, or a portion thereof. The epitope sequence is of at least 4 amino acid residues, at least 5 amino acid residues, at least 6 amino acid residues, at least 7 amino acid residues, at least 8 amino acid residues, at least 9 amino acid residues, at least 10 amino acid residues, at least 11 amino acid residues, at least 12 amino acid residues, at least 13 amino acid residues or at least 14 amino acid residues.

[0350] In Examples herein, polypeptides consisting of 4 amino acid residues (e.g., SEQ ID NOs: 30, 58, 61, 222, 238 and 345) were confirmed as epitopes binding to IgE antibodies in many samples. Moreover, the binding activity of polypeptides of 5 or more amino acid residues against IgE antibodies was also confirmed in many samples. Accordingly, the presence of at least 4 amino acid residues is useful as an epitope sequence.

[0351] In one embodiment, variants of the polypeptide of the present invention include polypeptides comprising at least 4 amino acid residues of each of the specific amino acid sequences defined in (E1) to (E50). For example, variants of the polypeptide comprising the amino acid sequence (E1) may include “polypeptides comprising at least 4 amino acid residues in at least one of the amino acid sequences of SEQ ID NOs: 29-130 and 2880”. Preferably, such variants comprise at least 4 amino acid residues, at least 5 amino acid residues, at least 6 amino acid residues, at least 7 amino acid residues, at least 8 amino acid residues, at least 9 amino acid residues, at least 10 amino acid residues, at least 11 amino acid residues, at least 12 amino acid residues, at least 13 amino acid residues, or at least 14 amino acid residues in at least one of the amino acid sequences of SEQ ID NOs: 29-130 and 2880. The same holds true for the amino acid sequences defined in (E2) to (E50).

[0352] In one embodiment, variants of each polypeptide of the present invention are not limited and comprise amino acid residues described below.
[0353] E1: at least 4 amino acid residues of ILWYH;
[0354] E2: at least 4 amino acid residues of FPQQHQQ;
[0355] E3: at least 4 amino acid residues of QQPFP;
[0356] E5: at least 4 amino acid residues of QSFPQ, and/or at least 4 amino acid residues of RPFIQ;
[0357] E6: at least 4 amino acid residues of WRAVL, at least 4 amino acid residues of KIGAT, and/or at least 4 amino acid residues of ATEPS;
[0358] E9: at least 4 amino acid residues of VPLVQ;
[0359] E10: at least 4 amino acid residues of ILFEE, and/or at least 4 amino acid residues of QSTKG;
[0360] E13: at least 4 amino acid residues of IIILQ;
[0361] E14: at least 4 amino acid residues of VPQLQ;
[0362] E15: at least 4 amino acid residues of TKGGK, and/or at least 4 amino acid residues of KPFVDI;
[0363] E16: at least 4 amino acid residues of TEPSQL, and/or at least 4 amino acid residues of SIDQN;
[0364] E17: at least 4 amino acid residues of PGQQQQ; E18: at least 4 amino acid residues of PIQQQP;
[0365] E19: at least 4 amino acid residues of SMILPRSDCKV;
[0366] E20: at least 4 amino acid residues of INVEN, and/or at least 4 amino acid residues of VEDNRR;
[0367] E21: at least 4 amino acid residues of KPWQQ;
[0368] E22: at least 4 amino acid residues of YLQPQQP, and/or at least 4 amino acid residues of SQQQA;
[0369] E23: at least 4 amino acid residues of VQQQ, and/or at least 4 amino acid residues of GQQQ;
[0370] E24: at least 4 amino acid residues of PFPQT;
[0371] E25: at least 4 amino acid residues of AQLEAIRS;
[0372] E26: at least 4 amino acid residues of YNPDKV, and/or at least 4 amino acid residues of FVPISG;
[0373] E27: at least 4 amino acid residues of KEAANF, and/or at least 4 amino acid residues of SQVIIM;
[0374] E28: at least 4 amino acid residues of SYLKK, and/or at least 4 amino acid residues of KVGYNP;
[0375] E29: at least 4 amino acid residues of SGKELE, and/or at least 4 amino acid residues of LPKFLKN;
[0376] E30: at least 4 amino acid residues of YTVRTLQRT;
[0377] E31: at least 4 amino acid residues of QVPLV;
[0378] E32: at least 4 amino acid residues of PTGAK, at least 4 amino acid residues of AKVTK, and/or at least 4 amino acid residues of AAIK;
[0379] E33: at least 4 amino acid residues of TGTIG, and/or at least 4 amino acid residues of KRFAS;
[0380] E34: at least 4 amino acid residues of PGALQ, and/or at least 4 amino acid residues of YLSGVIL;
[0381] E35: at least 4 amino acid residues of CTIAP, and/or at least 4 amino acid residues of PFGIFG;
[0382] E36: at least 4 amino acid residues of YSQPQQ, at least 4 amino acid residues of PISQ, and/or at least 4 amino acid residues of SQQQ;
[0383] E37: at least 4 amino acid residues of SRLLR, and/or at least 4 amino acid residues of IRNYRV;
[0384] E38: at least 4 amino acid residues of GIDKR, and/or at least 4 amino acid residues of ERFEK;
[0385] E39: at least 4 amino acid residues of RAIIY; E40: at least 4 amino acid residues of HDIDR, and/or at least 4 amino acid residues of VTEIV;
[0386] E41: at least 4 amino acid residues of KAWSGKT;
[0387] E42: at least 4 amino acid residues of SQVSF, and/or at least 4 amino acid residues of FQPSQL;
[0388] E43: at least 4 amino acid residues of QLVQQ, and/or at least 4 amino acid residues of QQLCC;
[0389] E44: at least 4 amino acid residues of LASL, and/or at least 4 amino acid residues of SKRV;
[0390] E45: at least 4 amino acid residues of KEAAE, and/or at least 4 amino acid residues of NKRS;
[0391] E46: at least 4 amino acid residues of KGPTL;
[0392] E47: at least 4 amino acid residues of YKIGG, and/or at least 4 amino acid residues of PVGRV;
[0393] E48: at least 4 amino acid residues of KNGD, and/or at least 4 amino acid residues of KMIPT;
[0394] E49: at least 4 amino acid residues of SANTH, and/or at least 4 amino acid residues of RSKW; and
[0395] E50: at least 4 amino acid residues of IVVEG, and/or at least 4 amino acid residues of GRDGY.

[0396] As shown in Table 2, the aforementioned sequences were found as sequences common in a plurality of sequences as to the specific sequences of each epitope binding to IgE antibodies in Examples.

[0397] In Table 2, the “preferred” sequence is a shorter partial sequence capable of functioning as an epitope in “Common 15-residue sequence”. The “more preferred” sequence is a sequence more preferable than the aforementioned shorter partial sequence for improving binding activity against IgE antibodies. The “key” sequence represents a sequence deemed to be particularly important in “Common 15-residue sequence” or “key” sequence. The amino acid sequence of “X” in the sequence of “key” is an amino acid residue confirmed to have binding activity against IgE antibodies that remains even after exchange to any given alanine (glycine when the original amino acid residue is alanine) in alanine/glycine scanning. Accordingly, X is any given amino acid residue, preferably alanine (or glycine). The sequence of “key” comprising no sequence of “X” was not found to have the amino acid residue confirmed to have binding activity against IgE antibodies that remains in alanine/glycine scanning.

[0398] As for the epitopes described in Table 2, the amino acid residue of X is an amino acid residue confirmed to have binding activity against IgE antibodies that remains even after change. In the present invention, preferably, one or more amino acid residues of X in the “key sequence” corresponding to each “preferred sequence” may be substituted by any given amino acid residue. In one embodiment, for example, in SEQ ID NO: 29 which is a preferred sequence, the corresponding key sequence is a plurality of sequences including SEQ ID NOs: 30 and 33. Hereinafter, the same holds true for other “preferred sequences” and “key sequences” of the polypeptide (E1), and the polypeptides (E2) to (E50).

[0399] The number of amino acid residues that may be substituted is not limited and is preferably no more than 6, no more than 5, no more than 4, no more than 3, no more than 2 or no more than 1. Hereinafter, the same holds true for the polypeptides (E2) to (E50).

[0400] Each sequence described in the right column “Synthetic sequence” and/or “SEQ ID NO” of graph No. of Table 2 is a sequence confirmed to have epitope cross-reaction in Example 5. “Confirmed to have epitope cross-reactivity” means that an IgE antibody in the serum of each allergic patient exhibits binding activity higher than (specifically, larger than “1” in FIGS. 7 to 12) that of an IgE antibody in the serum of a nonallergic subject. Accordingly, in one embodiment, the polypeptide of the present invention includes polypeptides comprising these amino acid sequences or consisting of these amino acid sequences. In one embodiment, the IgE antibody in the serum of each allergic patient exhibits at least 1.05 times, at least 1.10 times, at least 1.15 times, at least 1.20 times or at least 1.25 times higher than the binding activity of an IgE antibody in the serum of a nonallergic subject against the polypeptide of the present invention.

[0401] As referred to herein, in a preferred embodiment, the “polypeptides comprising the amino acid sequences defined in (E1) to (E50)” include a polypeptide comprising each amino acid sequence of the aforementioned polypeptides (E1) to (E50) or consisting of each amino acid sequence thereof, and any form (variant) in which amino acid residues are substituted as mentioned above. “Comprising each amino acid sequence of SEQ ID NO: xx” means that the amino acid sequence may additionally comprise any given amino acid sequence without influencing the binding between each amino acid sequence of SEQ ID NO: (including their aforementioned substituted forms) and an IgE antibody (i.e., their functions as an epitope).

[0402] Amino acid residues other than the specifically defined amino acid sequences in the polypeptides may be arbitrarily selected without influencing binding to IgE antibodies (i.e., their functions as epitopes). It is desirable to appropriately select these amino acid residues, preferably, from the sequences of their respective original epitopes or the sequences of their respective original proteins, though the amino acid residues are not limited thereto. For example, SEQ ID NO: 30 is defined only by “QPIQ”, and if other amino acid residues are added thereto, it is desirable to appropriately select the amino acid residues from the original sequence of SEQ ID NO: 29. Further, for the sequences described as (E1) in Table 2-1, it is desirable to add amino acid residues of a sequence derived from the original protein as defined in (9) (corresponding to spot (9)).

[0403] The polypeptides comprising the amino acid sequences defined above in (E1) to (E50) may be prepared by a technique of chemical synthesis such as solid-phase peptide synthesis. Alternatively, polypeptides comprising an epitope may be obtained by expressing them as recombinant polypeptides using a genetic recombination technique well known to those skilled in the art and by separating and purifying them using protein purification methods well known to those skilled in the art. Two or more of the polypeptides may be joined together in combination, or repeats of one epitope may be joined together. In this case, the binding activity against Ig antibodies is generally improved.

[0404] The lengths of the polypeptides comprising the amino acid sequences defined above in (E1) to (E50) are not particularly limited. In a preferred embodiment, the lengths of the polypeptides comprising the amino acid sequences defined above in (E1) to (E50) can be no more than 500 amino acids, no more than 300 amino acids, no more than 200 amino acids, no more than 100 amino acids, no more than 50 amino acids, no more than 30 amino acids, no more than 20 amino acids, no more than 15 amino acids, no more than 10 amino acids, or no more than 5 amino acids. In the case of a polypeptide in which repeats of one or more of the amino acid sequences defined above in (E1) to (E50) are joined together, the length of such an amino acid sequence moiety in a preferred embodiment may be no more than 1000 amino acids, no more than 750 amino acids, no more than 500 amino acids, no more than 250 amino acids, no more than 100 amino acids, no more than 75 amino acids, no more than 50 amino acids, no more than 30 amino acids, no more than 15 amino acids, no more than 10 amino acids or no more than 5 amino acids. The number of amino acid residues described in the preferred embodiments as the lengths of the aforementioned polypeptides is the total length of sequences flanking a spacer (excluding the spacer).

[0405] Preferably, the antigen of the present invention specifically binds to an IgE antibody from an allergic patient.

### Diagnosis Kit and Method (2)

[0406] The present invention provides a method for providing an indicator for diagnosing an allergy in a subject, the method comprising the steps of:
[0407] (i) contacting a sample obtained from the subject with an antigen, wherein the sample is a solution comprising an IgE antibody;
[0408] (ii) detecting binding between the IgE antibody present in the sample obtained from the subject and the antigen; and
[0409] (iii) when the binding between the IgE antibody in the subject and the antigen is detected, an indicator of the fact that the subject is allergic is provided;
   wherein the antigen is a polypeptide which is at least one of the polypeptides comprising the amino acid sequences defined above in (E1) to (E50), or a polypeptide in which two or more of the polypeptides comprising the amino acid sequences defined above in (E1) to (E50) are joined together via or without a spacer.

[0410] Hereinafter, the polypeptide which is at least one of the polypeptides comprising the amino acid sequences defined above in (E1) to (E50), or the polypeptide in which two or more of the polypeptides comprising the amino acid sequences defined above in (E1) to (E50) are joined together via or without a spacer is also referred to as the “antigen including (E1) to (E50)” in the present specification. The type of the spacer is not particularly limited, and an ordinary spacer that is used by those skilled in the art for joining together two or more peptides can be used. The spacer may be, for example, a hydrocarbon chain such as Acp (6)-OH, or a polypeptide such as an amino acid chain.

[0411] In the case of joining together the polypeptides comprising the amino acid sequences defined above in (E1) to (E50) via or without a spacer, the number of polypeptides to be joined together is not particularly limited. In one embodiment, the number of polypeptides to be joined together is at least 2, at least 3, at least 4, at least 5, at least 6, at least 8, at least 10 or at least 15. In one embodiment, the number of polypeptides to be joined together is no more than 30, no more than 20, no more than 15, no more than 10, no more than 8, no more than 6, no more than 5, no more than 3 or no more than 2.

[0412] The same or different repeats of the polypeptides comprising the amino acid sequences defined above in (E1) to (E50) may be joined together. In such a case of joining together two or more of the polypeptides comprising the amino acid sequences defined above in (E1) to (E50), the polypeptide of the present invention can also be applied to the method, the kit or the composition of the present invention.

[0413] The sample obtained from a subject is as described above in the subsection titled “Diagnosis kit and method (1)”.

[0414] Detection of contact and binding between the sample obtained from a subject and the polypeptide can be carried out by using a known method described above in the subsection titled “Diagnosis kit and method (1)”, such as ELISA (Enzyme-Linked Immunosorbent Assay), sandwich immunoassay, immunoblotting, immunoprecipitation, or immunochromatography.

[0415] The polypeptides comprising the amino acid sequences defined above in (E1) to (E50) may be provided in a state immobilized on a carrier. In this case, the steps (i) and (ii) mentioned above can be carried out using ELISA, sandwich immunoassay, immunochromatography, surface plasmon resonance, or the like. The step (i) mentioned above can be carried out by contacting the sample obtained from a subject with a surface on which the polypeptides comprising the amino acid sequences defined above in (E1) to (E50) are immobilized. The IgE antibody from the subject may be used in a state immobilized on a carrier, and binding to the polypeptides comprising the amino acid sequences defined above in (E1) to (E50) may be detected by the aforementioned technique. In order to establish binding to a carrier or a space from the carrier, or to facilitate contact of a polypeptide with an antibody, a spacer or a tag such as biotin may be added to the N terminus or C terminus of the polypeptide. In the case of binding to biotin, the carrier preferably has avidin.

[0416] The polypeptides comprising the amino acid sequences defined above in (E1) to (E50) may be in a state unimmobilized on a carrier. In this case, flow cytometry or the like can be used in the aforementioned steps (i) and (ii), and the presence of IgE antibody-bound polypeptides comprising the amino acid sequences defined above in (E1) to (E50) can be confirmed with laser beam. Examples of this method include a basophil activation test (BAT) which is a method in which a surface antigen CD203c that appears when basophils are activated by the contact of the polypeptides comprising the amino acid sequences defined above in (E1) to (E50) is detected. Another example includes a histamine release test (HRT) which examines whether histamine is released by further contacting the polypeptides comprising the amino acid sequences defined above in (E1) to (E50) with blood cells in a sample.

[0417] The polypeptides comprising the amino acid sequences defined above in (E1) to (E50) are antigens that specifically bind to IgE antibodies from allergic patients. Therefore, when binding between an IgE antibody from a subject and the antigen is detected, an indicator of the fact that the subject is allergic, also including cross-reactivity, is provided. In order to facilitate the synthesis of the polypeptides comprising the amino acid sequences defined above in (E1) to (E50) using, for example, E. coli, sequences may be added so as to flank the epitope to increase the sequence length. In such a case, when binding between an IgE antibody from a subject and the amino acid sequences defined above in (E1) to (E50) is detected, an indicator of the fact that the subject is allergic, also including cross-reactivity, is also provided. Therefore, any sequence may be added so as to flank the amino acid sequences defined above in (E1) to (E50) which are epitopes.

[0418] The present invention further provides a kit for diagnosing an allergy, comprising at least one of polypeptide comprising the amino acid sequences defined above in (E1) to (E50). The diagnosis kit of this invention may be used in the aforementioned method for providing an indicator for diagnosing an allergy or in a diagnosis method as described later. The diagnosis kit of this invention may comprise not only the at least one of polypeptide comprising the amino acid sequences defined above in (E1) to (E50), but also an anti-IgE antibody labeled with an enzyme and a chromogenic or luminescent substrate serving as a substrate for the enzyme. Also, a fluorescent-labeled anti-IgE antibody may be used. In the diagnosis kit of this invention, the polypeptide comprising the amino acid sequences defined above in (E1) to (E50) may be provided in a state immobilized on a carrier. The diagnosis kit of this invention may also be provided together with instructions on the procedure for diagnosis or a package containing said instructions.

[0419] In another embodiment, the aforementioned diagnosis kit comprises a companion diagnostic agent for an allergy. The companion diagnostic agent is used for identifying patients expected to respond to pharmaceutical products or identifying patients having the risk of severe adverse reactions to pharmaceutical products, or for studying the reactivity of pharmaceutical products in order to optimize treatment using the pharmaceutical products. Here, the optimization of treatment includes, for example, determination of dosage and administration, judgment regarding discontinuation of administration, and confirmation of an allergen component that is used to cause immunological tolerance.

[0420] The present invention further provides a composition for diagnosing an allergy, comprising at least one of polypeptide comprising the amino acid sequences defined above in (E1) to (E50). The diagnosis composition of this invention can be used in a diagnosis method as described below. The diagnosis composition of this invention may further comprise a pharmaceutically acceptable carrier and/or additives commonly used with the polypeptide of this invention depending on the need.

[0421] In one embodiment, the present invention provides a method for diagnosing an allergy in a subject, the method comprising:
[0422] (i) contacting a sample obtained from the subject with an antigen;
[0423] (ii) detecting binding between an IgE antibody present in the sample from the subject and the antigen; and
[0424] (iii) when the binding between the IgE antibody in the subject and the antigen is detected, diagnosing the subject as being allergic;
[0425] wherein the antigen is at least one of polypeptides defined as the polypeptides comprising the amino acid sequences defined above in (E1) to (E50). In this method, the steps (i) and (ii) are performed as described above regarding the corresponding steps of the method for providing an indicator for diagnosing an allergy.

[0426] In another embodiment, the present invention provides a method for diagnosing an allergy in a subject, the method comprising administering to the subject at least one of the polypeptides comprising the amino acid sequences defined above in (E1) to (E50). This method may be performed in the form of a skin test characterized by applying the polypeptide comprising the amino acid sequences defined above in (E1) to (E50) onto the skin. Examples of the skin test include various forms of tests, such as: a prick test in which a diagnosis composition is applied onto the skin and then a tiny prick to such an extent as not to provoke bleeding is made in the skin to allow the polypeptides comprising the amino acid sequences defined above in (E1) to (E50) to penetrate the skin, thereby observing a skin reaction; a scratch test in which a diagnosis composition is applied onto the skin and then the skin is lightly scratched to observe a reaction; a patch test in which a diagnosis composition in the form of cream, ointment, etc. is applied onto the skin to observe a reaction; and an intracutaneous test in which the polypeptides comprising the amino acid sequences defined above in (E1) to (E50) are administered intracutaneously to observe a reaction. If a skin reaction such as swelling occurs in a skin portion to which the polypeptide comprising the amino acid sequences defined above in (E1) to (E50) has been applied, the subject of interest is diagnosed as having an allergy. The amount of the aforementioned polypeptide to be applied to the skin in such tests can be, for example, not more than 100 μg per dose.

[0427] In the process of allergy diagnosis, an oral load test aiming to identify an antigen and to examine the degree of symptoms from antigen consumption is often adopted. At least one of the polypeptides comprising the amino acid sequences defined above in (E1) to (E50) can be used as an active ingredient for an oral load test to diagnose an allergy. Here, the polypeptide to be used in the oral load test may be a polypeptide that has been expressed and purified and may be a polypeptide that has been expressed in raw materials or processed products, such as rice-based vaccine expressing pollen allergens which are obtained by transforming rice with a gene of a cedar pollen antigen and expressing the polypeptide in the rice.

[0428] In one embodiment, the diagnosis composition or the diagnosis kit described above may be used for a prick test, a scratch test, a patch test, an intracutaneous test or the like.

[0429] In still another embodiment, the present invention provides at least one of the polypeptides comprising the amino acid sequences defined above in (E1) to (E50), intended for use in the diagnosis of an allergy.

[0430] In still another embodiment, the present invention provides use of at least one of the polypeptides comprising the amino acid sequences defined above in (E1) to (E50) in the production of a diagnostic agent for an allergy.

[0431] In this subsection, the allergy to be diagnosed can be allergies to the aforementioned polypeptides comprising the amino acid sequences defined above in (E1) to (E50). Thus, diagnosis of the allergy including detection of the allergy and provision of a diagnostic indicator can be diagnosis of not only an allergy to a single one of the polypeptides comprising the amino acid sequences defined above in (E1) to (E50), but also allergies including cross-reactivity.

### Composition and Treatment Method (2)

[0432] The present invention provides a composition comprising at least one of the polypeptides comprising the amino acid sequences defined above in (E1) to (E50).

[0433] In one embodiment, the composition of the present invention is a pharmaceutical composition. In one embodiment, the composition of the present invention is a quasi-pharmaceutical composition or a non-pharmaceutical composition (e.g., a cosmetic composition and a food composition).

[0434] In one embodiment, the aforementioned composition is used for the treatment of an allergy. The treatment of an allergy increases the limit amount of a polypeptide in which the polypeptide does not develop even if the antigen is incorporated into the body, and finally aims for the state where the allergy does not develop by the common amount of the polypeptide to be consumed (remission).

[0435] The present invention also provides a method for treating an allergy, the method comprising administering at least one of the polypeptides comprising the amino acid sequences defined above in (E1) to (E50) to a patient in need of a treatment for an allergy.

[0436] In another embodiment, the present invention provides at least one of the polypeptides comprising the amino acid sequences defined above in (E1) to (E50), intended for use in the treatment for an allergy. In yet another embodiment, the present invention provides use of at least one of the polypeptides comprising the amino acid sequences defined above in (E1) to (E50) for the production of a therapeutic agent for an allergy.

[0437] In the process of allergy treatment, a hyposensitization therapy aiming to induce immunological tolerance by administering an antigen to a patient is often adopted. The at least one of the polypeptides comprising the amino acid sequences defined above in (E1) to (E50) can be used as an active ingredient for hyposensitization therapy for an allergy. Here, the antigen to be used in the hyposensitization therapy may be a polypeptide that has been expressed and purified and may be a polypeptide that has been expressed in raw materials or processed products as rice, such as rice-based vaccine expressing pollen allergens.

[0438] The administration route, administration dose, frequency and/or period of the composition of this invention, and other ingredients to be contained in the composition, and the dosage form can be as described above in the subsection titled “Composition and treatment method (1)”. In the case of using the polypeptides comprising the amino acid sequences defined above in (E1) to (E50), for example, the dose to an adult patient may be a dose of not more than 100 μg per dose.

[0439] In this subsection, the allergy to be treated can be allergies to the polypeptides comprising the amino acid sequences defined above in (E1) to (E50). Thus, treatment of the allergy can be treatment of not only an allergy to a single allergen, but also allergies including cross-reactivity.

### Tester Composition (2)

[0440] The present invention provides a tester composition comprising an antibody for at least one of the polypeptides comprising the amino acid sequences defined above in (E1) to (E50).

[0441] The antibody can be prepared by a conventional method. For example, the antibody may be prepared by immunizing a mammal such as rabbit with the polypeptides comprising the amino acid sequences defined above in (E1) to (E50). The antibody may be an Ig antibody, a polyclonal antibody, a monoclonal antibody, or an antigen-binding fragment thereof (e.g., Fab, F(ab′)₂, Fab′).

[0442] Further, in the aforementioned tester composition, the antibody may be provided in a form bound to a carrier. The type of the carrier is not particularly limited as long as it is usable for detection of binding between an antibody and the polypeptides comprising the amino acid sequences defined above in (E1) to (E50). Any given carrier known to those skilled in the art can be used. Also, the antibody for the polypeptides comprising the amino acid sequences defined above in (E1) to (E50) is preferably an antibody for polypeptides having the same amino acid sequences as the epitope and the important amino acid described above in the subsection titled “Epitope of antigen”. This can attain a tester composition that can also detect cross-reactivity.

[0443] Examples of a method for determining the presence or absence of the polypeptides comprising the amino acid sequences defined above in (E1) to (E50) include the following methods:
[0444] a method in which a prepared tester composition comprising an antibody is contacted with a sample obtained from a raw material, a processed product, etc., ELISA or the like is used to detect whether there is a binding between the antibody and the polypeptides comprising the amino acid sequences as defined above in (E1) to (E50) in the sample, and if the binding between the antibody and the polypeptides comprising the amino acid sequences defined above in (E1) to (E50) is detected, it is determined that the polypeptides comprising such amino acid sequences are contained in the raw material, the processed product, etc. of interest (the “method for determining the presence or absence of a polypeptide” comprises confirming that the polypeptide is eliminated or reduced when the binding between the antibody and the polypeptides comprising the amino acid sequences defined above in (E1) to (E50) is reduced); and
[0445] a method in which filter paper is impregnated with a raw material, a processed product, etc. and reacted with an antibody solution so as to detect the polypeptides comprising the amino acid sequences defined above in (E1) to (E50) contained therein.

[0446] Another embodiment of the present invention includes a tester composition for determining the presence or absence of a polypeptide comprising the amino acid sequences defined above in (E1) to (E50) of an allergy in an object of interest, the tester composition comprising a primer appropriate for a polypeptide having an amino acid sequence where epitope and important amino acid are identical. The primer is not limited and may be designed so as to comprise, for example, a portion of the nucleotide sequence of a nucleic acid encoding any of the amino acid sequences defined above in (E1) to (E50), or a complementary strand thereof. Alternatively, the primer may be designed so as to be the nucleotide sequence of a region upstream of a portion encoding polypeptides having the same amino acid sequences as an epitope that is any of the amino acid sequences defined above in (E1) to (E50), and an important amino acid, in nucleic acids encoding proteins comprising the polypeptides having the same amino acid sequences as the epitope and the important amino acid, or the nucleotide sequence of a complementary strand of a region downstream of the portion encoding polypeptides having the same amino acid sequences as the epitope and the important amino acid. Examples of such a primer include a primer which is a portion of at least one nucleotide sequence selected from the group consisting of SEQ ID NOs: 1, 3, 5, 7, 9, 11, 13, 15, 17, 19, 21, 23, 25 and 27 and/or a primer which is a portion of a sequence complementary to at least one nucleotide sequence selected from the group consisting of SEQ ID NOs: 1, 3, 5, 7, 9, 11, 13, 15, 17, 19, 21, 23, 25 and 27. Here, the position of the epitope in the full-length sequence of an antigen is as defined in Table 2 on the basis of the results of Examples. Particularly, when mRNA is of interest, the tester composition has a complementary primer of a poly-A tail.

[0447] For example, DNA is amplified by PCR (Polymerase Chain Reaction) including RT-PCR using templated DNA or mRNA obtained from a sample and the aforementioned primer, and the presence or absence of a nucleic acid encoding the amino acid sequences defined above in (E1) to (E50) in the sequence of the amplified DNA is determined to determine the presence or absence of the antigen comprising the aforementioned (E1) to (E50). Amplification methods by PCR for mRNA of interest can be exemplified by RACE. When one of amino acid sequences encoded by three possible open reading frames in the amplified DNA comprises any of the amino acid sequences defined above in (E1) to (E50), it is determined that the antigen is present. When no DNA is amplified, it is determined that the antigen is absent.

[0448] In one embodiment, the aforementioned tester composition is used to determine the presence or absence of the polypeptides comprising the amino acid sequences defined above in (E1) to (E50) in raw materials or processed products of interest in a food production line. The raw material may be a cooking ingredient or may be a cosmetic raw material, a pharmaceutical raw material or the like. The processed product may be an edible processed product or may be a cosmetic, a pharmaceutical product or the like. The tester composition may also be used for search for organism species contained in raw materials, may be used for quality inspection of production lines and pre-shipment products by manufacturers, or may be used for self-checking of the presence or absence of an antigen in raw materials or processed products of interest by consumers or users.

### Method for Determining Presence or Absence of Polypeptide (2)

[0449] The present invention includes a method for determining the presence or absence of the polypeptides comprising the amino acid sequences defined above in (E1) to (E50) in a raw material or a processed product. This method comprises detecting a polypeptide having the whole or a portion of any of the amino acid sequences of the polypeptides comprising the amino acid sequences defined above in (E1) to (E50) in a raw material or a processed product.

[0450] In one embodiment, the method of the present invention comprises a step of determining the presence or absence of at least one of the polypeptides comprising the amino acid sequences defined above in (E1) to (E50) in a substance of interest, the step comprising contacting an antibody for the at least one of the polypeptides comprising the amino acid sequences defined above in (E1) to (E50) with a raw material or a processed product (including a liquid).

[0451] Such an antibody, definition of the raw material or the processed product, a method for preparing the antibody, a method for contacting the antibody with a raw material or a processed product, the binding between the antibody and the antigen, etc. are as described above in the subsection titled “Tester composition (2)”.

[0452] Alternatively, the aforementioned method for determining the presence or absence of an antigen also includes a embodiment in which a portion of an epitope in the polypeptides comprising the amino acid sequences defined above in (E1) to (E50) contained in an antigen is detected. The “portion of an epitope” is preferably at least 4 amino acid residues, at least 6 amino acid residues or at least 8 amino acid residues. Detection of the portion of an epitope can be carried out by a known method for detecting a particular amino acid sequence that is a portion of a polypeptide. For example, a method is possible in which a protein in a raw material, a processed product, etc. (e.g., a cooking ingredient) of interest is cleaved with a digestive enzyme for an antigen elimination treatment and separated by HPLC or the like, and whether a peak of an any given epitope peptide is reduced by the antigen elimination treatment is measured. Alternatively, the presence or absence of an antigen comprising any of the polypeptides comprising the amino acid sequences defined above in (E1) to (E50) in a substance of interest may be determined using an antibody that recognizes a portion of the polypeptides comprising the amino acid sequences defined above in (E1) to (E50).

### Antigen-Free Raw Materials and the Like (2)

[0453] The present invention provides a food raw material or an edible processed product in which at least one of the polypeptides comprising the amino acid sequences defined above in (E1) to (E50) is eliminated or reduced.

[0454] The method for eliminating or reducing the antigen of the present invention in raw materials or processed products is not limited. The elimination or reduction of the antigen may be conducted by any method, as long as the method permits the elimination or reduction of the polypeptides comprising the amino acid sequences defined above in (E1) to (E50). For example, the techniques described above in the subsection titled “Antigen-free food and the like” may be used.

[0455] Elimination or reduction of at least one of the polypeptides comprising the amino acid sequences defined above in (E1) to (E50) may be achieved by eliminating or reducing the whole amino acid sequence or may be achieved by cleaving or removing the the amino acid sequence moieties defined above in (E1) to (E50) from the antigen protein. The “removal” includes deletion and modification of the whole or a portion of the sequence moieties defined above in (E1) to (E50).

[0456] For example, the raw material in which the polypeptides comprising the amino acid sequences defined above in (E1) to (E50) are eliminated or reduced may be obtained by preparing a raw material in which the polypeptides comprising the amino acid sequences defined above in (E1) to (E50) are no longer expressed, using a genetic modification technique. Any technique known to those skilled in the art can be used as a genetic modification knock-out technique.

[0457] The processed product in which the polypeptides comprising the amino acid sequences defined above in (E1) to (E50) are eliminated or reduced may be a processed product of the raw material in which the polypeptides comprising the amino acid sequences defined above in (E1) to (E50) are eliminated or reduced, such as powdered milk obtained with a protein digest as a raw material. In the case of using an ordinary raw material, a treatment for removing or reducing the polypeptides comprising the amino acid sequences defined above in (E1) to (E50) is performed before, during or after preparation of a processed product. The “preparation of the processed product” means, for example, preparation of a processed food product (e.g., processed products of wheat, for example, bread, pasta, wheat needle and cake) from a food raw material (e.g., wheat).

[0458] The techniques described in the subsection titled “Antigen-free food and the like” may be used as methods for removing or reducing the polypeptides comprising the amino acid sequences defined above in (E1) to (E50) in processed products obtained with an ordinary raw materials. Examples of the method for cleaving the polypeptides comprising the amino acid sequences defined above in (E1) to (E50) include a method in which a polypeptide is treated by cleavage with a particular digestive enzyme.

Method for Producing Raw Material or Processed Product in which Antigen is Eliminated or Reduced (2)

[0459] The present invention provides a method for producing a raw material or a processed product in which at least one of the polypeptides comprising the amino acid sequences defined in (E1) to (E50) is eliminated or reduced, the method comprising the step of confirming that the antigen is eliminated or reduced, in a production process of the processed product.

[0460] In the production method, elimination or reduction of the polypeptides comprising the amino acid sequences defined in (E1) to (E50) means that at least one of the polypeptides comprising the amino acid sequences defined above in (E1) to (E50) is eliminated or reduced, or the sequence moieties defined in (E1) to (E50) are cleaved or removed from the antigen.

[0461] A technique of confirming that the polypeptide is eliminated or reduced in the production process of the raw material or processed product is not particularly limited, and any technique capable of detecting at least one of the polypeptides comprising the amino acid sequences defined above in (E1) to (E50) may be used. For example, the presence or absence of the polypeptide in the raw material or processed product may be confirmed from the binding activity of an antibody for at least one of the polypeptides comprising the amino acid sequences defined above in (E1) to (E50) against a sample containing a material resulting from the production process of the raw material or processed product. Details of such a method are as described above in the subsection titled “Diagnosis kit and method”. Thus, in the production method, the “IgE antibody from a subject” described above in the subsection titled “Diagnosis kit and method (2)” is replaced with the “antibody for at least one of the polypeptides comprising the amino acid sequences defined above in (E1) to (E50)”, and the “antigen” “polypeptide” described above in the subsection titled “Diagnosis kit and method (2)” is replaced with the “sample containing a material resulting from the production process of the processed product”. The techniques described above in the subsection titled “Diagnosis kit and method (2)” can be used to confirm that the antigen is eliminated or reduced in the production process of the processed product. The tester compositions described above in the subsection titled “Tester composition (2)” can also be used.

[0462] The present invention also relates to use of a kit in a method for diagnosing an allergy, use of a kit for diagnosing an allergy and/or for providing an indicator for diagnosis, a composition for use in a method for diagnosing an allergy, use of a composition for diagnosing an allergy and/or for providing an indicator for diagnosis, a method for diagnosing an allergy and/or for a providing an indicator for diagnosis, use of an antigen (protein antigen or epitope antigen) in a method for detecting the presence or absence of an IgE antibody in a sample obtained from a subject (an organism such as a human), an antigen (protein antigen or epitope antigen) for use in treatment of an allergy, a kit or a composition for detecting the binding between an IgE antibody in a sample obtained from a subject (an organism such as a human) and an antigen (protein antigen or epitope antigen), comprising the antigen (protein antigen or epitope antigen), and use of a kit or a composition for detecting the binding between an IgE antibody in a sample obtained from a subject (an organism such as a human) and an antigen (protein antigen or epitope antigen), the kit or the composition comprising the antigen (protein antigen or epitope antigen). Each term such as the “antigen” is as mentioned above.

### EXAMPLES

[0463] The following describes examples of the present invention. The technical scope of this invention is not limited by these examples.

### Example 1: Confirmation of a Protein Pattern

[0464] Proteins contained in wheat (Triticum aestivum) were investigated using a two-dimensional electrophoresis method described below.

### Protein Extraction

[0465] Extraction and purification of proteins contained in wheat were carried out as follows. The proteins were extracted by adding mammalian cell lysis kit; MCL1 (produced by Sigma-Aldrich Co. LLC) to wheat flour. The constituents of the mammalian cell lysis kit; MCLI are as mentioned below.
[0466] 50 mM Tris-HCl pH 7.5
[0467] 1 mM EDTA
[0468] 250 mM NaCl
[0469] 0.1% (w/v) SDS
[0470] 0.5% (w/v) Deoxycholic acid sodium salt
[0471] 1% (v/v) Igepal CA-630 (surfactant (Octylphenoxy) polyethoxyethanol produced by Sigma-Aldrich Co. LLC)

### Appropriate Amount of Protease Inhibitor

Thereafter, the precipitation procedure was repeated twice using 2D-CleanUP Kit (produced by GE). In the first round of precipitation, the collected liquid protein extract was precipitated by adding TCA (trichloroacetic acid) thereto and the precipitated product produced by this procedure (TCA-precipitated product) was collected. In the second round of precipitation, the TCA-precipitated product collected above was further precipitated by adding acetone thereto and the precipitated product (sample) produced by this procedure was collected.

### Preparation of a Sample Solution

[0472] Part of the collected sample (50 μg on a protein weight basis) was dissolved in 150 μL of a DeStreak Rehydration Solution (produced by GE), which is a swelling buffer for first-dimensional isoelectric focusing gels, thereby obtaining a sample solution for first-dimensional isoelectric focusing (sample solution for swelling). The constituents of the DeStreak Rehydration Solution are as mentioned below.
[0473] 7M thiourea
[0474] 2M urea
[0475] 4% (w/v) of CHAPS
[0476] 0.5% (v/v) IPG buffer; produced by GE
[0477] Moderate amount of BPB (bromophenol blue)
[0478] Penetration of the sample into first-dimensional isoelectric focusing gels

[0479] First-dimensional isoelectric focusing gel strips (Immobiline Drystrip IPG gels (pH3-10NL); produced by GE) were immersed in 140 μL of the foregoing sample solution for first-dimensional isoelectric focusing (sample solution for swelling) and impregnated with the solution at room temperature overnight.

[0480] In this example, an IPGphor electrophoresis system produced by GE was used.

[0481] An electrophoresis tray was filled with silicone oil. Filter paper moisten with water was positioned at both ends of the gel strips impregnated with the sample, and the gel strips were set in the electrophoresis tray such that the gel strips were covered with silicone oil. Electrodes were placed on the gel strips with the filter paper intervening therebetween.

[0482] The maximum current of the isoelectric focusing system was set to 75 uA per gel strip, and the first-dimensional isoelectric focusing was carried out according to the following voltage program: (1) a constant voltage step was performed at a constant voltage of 300 V until the volt-hours reached 750 Vhr (the current variation width during electrophoresis for 30 minutes before the end of this step was 5 uA); (2) the voltage was increased gradually to 1000 V for 300 Vhr; (3) the voltage was further increased gradually to 5000 V for 4500 Vhr; and then (4) the voltage was held at a constant voltage of 5000 V until the total Vhr reached 12000.

### SDS Equilibration of Isoelectric Focusing Gels

[0483] After the aforementioned first-dimensional isoelectric focusing was done, the gel strips were taken out of the isoelectric focusing system, immersed in an equilibration buffer containing a reducing agent, and shaken at room temperature for 15 minutes. The constituents of the equilibration buffer containing the reducing agent are as mentioned below.
[0484] 100 mM Tris-HCl (pH 8.0)
[0485] 6M urea
[0486] 30% (v/v) glycerol
[0487] 2% (w/v) SDS
[0488] 1% (w/v) DTT

[0489] Next, the equilibration buffer containing the reducing agent was removed, and then the gel strips were immersed in an equilibration buffer containing an alkylating agent and shaken at room temperature for 15 minutes to obtain SDS-equilibrated gels. The constituents of the equilibration buffer containing the alkylating agent are as mentioned below.
[0490] 100 mM Tris-HCl (pH 8.0)
[0491] 6M urea
[0492] 30% (v/v) glycerol
[0493] 2% (w/v) SDS
[0494] 2.5% (w/v) iodoacetamide
[0495] Second-dimensional SDS-PAGE

[0496] In this example, the XCell SureLock Mini-Cell electrophoresis system produced by Life Technologies was used. The second-dimensional electrophoresis gels used were NuPAGE 4-12% Bis-Tris Gels produced by Life Technologies. Also, an electrophoresis buffer composed of the following constituents was prepared and used.
[0497] 50 mM MOPS
[0498] 50 mM Tris base
[0499] 0.1% (w/v) SDS
[0500] 1 mM EDTA

[0501] Further, an agarose solution for gel adhesion was used in this example, which was prepared by dissolving 0.5% (w/v) Agarose S (produced by Nippon Gene Co., Ltd.) and a moderate amount of BPB (bromophenol blue) in the electrophoresis buffer.

[0502] SDS-PAGE wells were washed well with the electrophoresis buffer, and then the buffer used for the washing was removed. Next, the washed wells were charged with the fully dissolved agarose solution for gel adhesion. Next, the SDS-equilibrated gel strips were immersed in agarose and closely adhered to second-dimensional electrophoresis gels using tweezers. After it was confirmed that agarose was fully fixed with the gels being closely adhered to each other, electrophoresis was performed at a constant voltage of 200 V for about 45 minutes.

### Fluorescent Staining of Gels

[0503] The gels were fluorescently stained with SYPRO Ruby (produced by Life Technologies).

[0504] First, an airtight container to be used was washed well in advance with 98% (v/v) ethanol. The electrophoresed second-dimensional electrophoresis gel strips were taken out of the SDS-PAGE system, placed onto the washed airtight container, and treated twice by immersion in 50% (v/v) methanol and 7% (v/v) aqueous solution containing acetic acid for 30 minutes. Then, a further immersion treatment was done for 10 minutes, with the solution being replaced by water. Next, the second-dimensional electrophoresis gel strips were immersed in 40 mL of SYPRO Ruby and shaken at room temperature overnight. Thereafter, the SYPRO Ruby was removed, and then the second-dimensional electrophoresis gel strips were washed with water and shaken in 10% (v/v) methanol and 7% (v/v) aqueous solution containing acetic acid for 30 minutes. Further shaking was done for at least 30 minutes, with the solution being replaced by water.

### Analysis

[0505] The second-dimensional electrophoresis gels obtained through the foregoing series of treatments were subjected to fluorescent image scanning on Typhoon 9500 (produced by GE). The results of the two-dimensional electrophoresis as to the proteins contained in the wheat are shown in FIG. 1. Molecular weight marker bands are found at the left of the photograph of the gel of each panel. The positions of the bands denote particular molecular weights (in KDa).

### Example 2: Identification of Antigens by Immunoblotting

[0506] Identification of antigens by immunoblotting was carried out by taking all the steps up to the step of “Second-dimensional SDS-PAGE” as described above in Example 1, followed by the steps of “Transfer to membrane”, “Immunoblotting” and “Analysis” as described below.

### Transfer to Membrane

[0507] Transfer to membrane was done using the following transfer system and transfer buffer.
[0508] Transfer system: XCell SureLock Mini-Cell and XCell II Blot Module (produced by Life Technologies)
[0509] Transfer buffer: NuPAGE Transfer Buffer (×20) (produced by Life Technologies), used in a form diluted 200-fold with milliQ water.

[0510] To be specific, proteins in the two-dimensional electrophoresis gels were transferred to a membrane (PVDF membrane) according to the following procedure.
[0511] (1) The PVDF membrane was immersed in 100% methanol followed by milliQ water, and then moved into the transfer buffer to hydrophilize the PVDF membrane.
[0512] (2) After sponge, filter paper, the gels treated by second-dimensional SDS-PAGE, the hydrophilized PVDF membrane, filter paper, and sponge were put in place in this order, the transfer system was energized at a constant voltage of 30 V for one hour.

### Immunoblotting

[0513] Immunoblotting of the membrane was carried out using, as a primary antibody, a serum sample from a patient with a wheat allergy (WDEIA cases and cases with general immediate type allergy, which requires no exercise for its development) or a serum sample from a non-wheat-allergic subject.

[0514] Immunoblotting of the membrane was carried out according to the following procedure.
[0515] (1) The transferred membrane was shaken in a 5% skim milk/PBST solution (a PBS buffer containing 0.1% Tween 20 nonionic surfactant) at room temperature for one hour.
[0516] (2) The membrane was left to stand in a solution of 4% primary antibody serum in 3% skim milk/PBST at room temperature for one hour.
[0517] (3) The membrane was washed with a PBST solution (5 min.×3 times).
[0518] (4) The membrane was left to stand in a 1:1000 dilution of the secondary antibody, anti-human IgE-HRP (horseradish peroxidase), with a 3% skim milk/PBST solution at room temperature for one hour.
[0519] (5) The membrane was washed with a PBST solution (5 min.×3 times).
[0520] (6) The membrane was left to stand in Pierce Western Blotting Substrate Plus (produced by Thermo Fisher Scientific) for 5 minutes.

### Analysis

[0521] The membrane obtained through the foregoing series of treatments was subjected to fluorescent image scanning on Typhoon 9500 (produced by GE).

[0522] The immunoblots obtained with the serum from the wheat-allergic patient were compared with those obtained with the control serum from the non-wheat-allergic subject. For protein present in wheat, in immunoblotting using the serum from the wheat-allergic patient, 16 spots were detected (FIG. 2), which are different from the spots detected when the serum of the non-wheat-allergic subject was used and different from those of the known wheat allergen proteins. As a result of analyzing the amino acid sequences in Example 3, spots 11 and 12 or spots 15 and 16 were found to be derived from the same protein. The isoelectric point of each spot is described in Table 1.

### Example 3: Mass Spectrometry and Identification of Antigens

[0523] The amino acid sequences of the antigens that form the protein spots were identified by mass spectroscopy.

[0524] To be specific, protein extraction and mass spectroscopy were done by the following procedure.
[0525] (1) Wheat was subjected to protein extraction, two-dimensional electrophoresis and transfer to membrane by following the procedures described in Example 1 and 2, and the resulting membrane was stained by shaking in a solution of 0.008% Direct blue in 40% ethanol and 10% acetic acid.
[0526] (2) Then, the membrane was decolorized by repeating a 5-minute treatment with 40% ethanol and 10% acetic acid three times, washed with water for 5 minutes, and then dried by air.
[0527] (3) A protein spot of interest was cut out with a clean cutter blade and put into a centrifugal tube. The cut membrane was subjected to hydrophilization with 50 μL of methanol, followed by washing with 100 μL of water twice and then centrifugal cleaning. Thereafter, 20 μL of 20 mM NH₄HCO₃ and 50% acetonitrile were added.
[0528] (4) 1 μL of 1 pmol/μL lysyl endopeptidase (produced by WAKO) was added, and the solution was left to stand at 37° C. for 60 minutes and then collected in a new centrifugal tube. After 20 μL of 20 mM NH₄HCO₃ and 70% acetonitrile were added to the membrane, the membrane was immersed therein at room temperature for 10 minutes, and the resulting solution was further collected. The solution was dissolved with 0.1% formic acid and 10 μL of 4% acetonitrile and transferred to a tube.
[0529] (5) The collected solution was dried under reduced pressure, dissolved with 15 μL of solution A (a 0.1% formic acid/4% acetonitrile solution), and analyzed by mass spectroscopy (ESI-TOF6600, produced by AB Sciex).
[0530] (6) Identification of proteins based on the MS data obtained with the mass spectrometer was done by searching the NCBI database.

### Results

[0531] The amino acid sequence of each spot was detected. Further, the mass spectroscopic data of each spot obtained on a mass spectrometer was analyzed in Uniprot. As a result, each spot was found to be the protein shown in Table 1.

[0532] Spots 11 and 12 or spots 15 and 16 are derived from the same protein. The immunoblot of Example 2 recognized these spots as separate spots because even the same amino acid sequence varied in isoelectric point and/or molecular weight due to a posttranslational modification such as sugar chain modification or modification at a phosphate group. The binding to IgE antibodies was confirmed in spite of such difference in posttranslational modification, indicating that the posttranslational modification has no influence.

### Example 4: Identification of Epitopes

### Epitopes of Allergen Components of Wheat

[0533] Identification of epitopes was carried out by the following procedure as to epitopes of allergen components of wheat.

### (A) Wheat Epitope Mapping (1)

[0534] Epitope mapping was carried out using a library of overlapping peptides (length: 15 amino acids) corresponding to the amino acid sequences identified as allergy components of wheat. Specifically, the library of overlapping peptides was prepared on the basis of the amino acid sequences of SEQ ID NOs: 2, 4, 6, 8, 10, 12, 14, 16, 18, 20, 22, 24, 26 and 28.

[0535] The peptides to be synthesized were shifted by 10 amino acids. Thus, each peptide had an overlap of 5 amino acids with each of the peptides previous and subsequent thereto.

[0536] For preparation of peptide arrays, the Intavis CelluSpots™ technique was used. Specifically, the peptide arrays were prepared by the following procedure: (1) synthesizing peptides of interest on amino-modified cellulose disks using an automated chemical synthesis apparatus (Intavis MultiPep RS), (2) dissolving the amino-modified cellulose disks to obtain a cellulose-bound peptide solution, and (3) spotting the cellulose-bound peptides onto coated glass slides. The details of each procedure are as described below.

### (1) Synthesis of Peptide

[0537] Peptide synthesis was carried out in incremental steps through 9-fluorenylmethoxycarbonyl (Fmoc) chemical reaction on amino-modified cellulose disks in 384-well synthesis plates. Specifically, amino acids in which a Fmoc group is bonded to an amino group were activated in a solution of N,N′-diisopropylcarbodiimide (DIC) and 1-hydroxybenzotriazole (HOBt) in dimethylformamide (DMF) and added dropwise to the cellulose disks so that the Fmoc group-bound amino acids were bound to the amino groups on the cellulose disks (coupling). Unreacted amino groups were capped with acetic anhydride and washed with DMF. Furthermore, the Fmoc groups were eliminated from the amino groups of the amino acids bound to the amino groups on the cellulose disks by treatment with piperidine and washing with DMF. The amino acids bound to the amino groups on the cellulose disks were repetitively subjected to the coupling, the capping, and the Fmoc group elimination described above to elongate the amino terminus for peptide synthesis.

### (2) Dissolution of Amino-Modified Cellulose Disk

[0538] The peptides-bound cellulose disks of interest obtained above in the subsection titled “(1) Synthesis of peptide” were transferred to 96-well plates and treated with a side chain deprotection mixed solution of trifluoroacetic acid (TFA), dichloromethane, triisopropylsilane (TIPS), and water for deprotection of amino acid side chains. Then, the deprotected cellulose-bound peptides were dissolved in a mixed solution of TFA, perfluoromethanesulfonic acid (TFMSA), TIPS, and water and precipitated in tetrabutyl methyl ether (TBME), and the precipitate was resuspended in dimethyl sulfoxide (DMSO) and mixed with a mixed solution of NaCl, sodium citrate, and water to obtain a peptide solution for slide spotting.

### (3) Spotting of Cellulose-Bound Peptide Solution

[0539] The peptide solution for slide spotting obtained above in the subsection titled “(2) Dissolution of amino-modified cellulose disk” was spotted onto Intavis CelluSpots™ slides using Intavis Slide Spotting Robot, and the slides were dried to prepare peptide arrays.

[0540] The presence or absence of binding, to each peptide fragment, of an IgE antibody present in the serum of a wheat-allergic patient was measured through antigen-antibody reaction using the peptide arrays. The measurement was carried out according to the following procedure.
[0541] (1) The peptides were shaken at room temperature for 1 hour in Pierce Protein-Free (PBS) Blocking Buffer (produced by Thermo Fisher Scientific).
[0542] (2) The peptide arrays were shaken at overnight at 4° C. in 2% serum/Pierce Protein-Free (PBS) Blocking Buffer (produced by Thermo Fisher Scientific).
[0543] (3) The peptide arrays were washed with PBST (a PBS buffer containing 3% Tween 20 nonionic surfactant) for 5 minutes (×3).
[0544] (4) Anti-human IgE antibody-HRP (1:20,000, Pierce Protein-Free (PBS) Blocking Buffer (produced by Thermo Fisher Scientific)) was added thereto, and the peptide arrays were shaken at room temperature for 1 hour.
[0545] (5) The peptide arrays were washed with PBST for 5 minutes (×3).
[0546] (6) Pierce ECL Plus Western Blotting Substrate (produced by Thermo Fisher Scientific) was added thereto, and the peptide arrays were shaken at room temperature for 5 minutes.
[0547] (7) The chemiluminescence of the peptides treated as described above in (1) to (6) was measured using Amersham Imager 600.

[0548] Chemiluminescence intensity in images obtained by the measurement described above in (7) was converted into a numeric value using ImageQuant TL (GE Healthcare). The second highest value among numeric values determined from images obtained from results about the serum of 5 non-wheat-allergic subjects was defined as the N2nd value. The N2nd value of each peptide was subtracted from numeric values determined from images obtained from results about the serum of 49 patients (32 WDEIA cases, 8 children cases with general immediate type allergy to wheat, and 9 adult cases). It was determined that a peptide having a value of at least 35,000 as the difference was a peptide bound to an IgE antibody in a patient-specific manner.

[0549] As a result, patient-specific IgE antibodies were confirmed to bind to the peptides (SEQ ID NOS: 29, 131, 191, 281, 346, 414, 493, 562, 640, 706, 776, 899, 974, 1010, 1089, 1142, 1166, 1209, 1257, 1297, 1367, 1403, 1508, 1566, 1598, 1608, 1685, 1753, 1789, 1836, 1895, 1977, 2004, 2027, 2068, 2154, 2217, 2265, 2309, 2342, 2419, 2491, 2545, 2613, 2631, 2674, 2701, 2774, 2809 and 2830) derived from spots 1-16 (spots 11 and 12 or spots 15 and 16 are derived from the same protein) excluding known epitopes.

### (B) Wheat Epitope Mapping (2): Overlapping

[0550] On the basis of the sequences (SEQ ID NOs: SEQ ID NO: 29, 131, 191, 281, 346, 414, 493, 562, 640, 706, 776, 899, 974, 1010, 1089, 1142, 1166, 1209, 1257, 1297, 1367, 1403, 1508, 1566, 1598, 1608, 1685, 1753, 1789, 1836, 1895, 1977, 2004, 2027, 2068, 2154, 2217, 2265, 2309, 2342, 2419, 2491, 2545, 2613, 2631, 2674, 2701, 2774, 2809 and 2830) of the peptides bound to an IgE antibody in serum in a patient-specific manner as described above in (A), a library of overlapping peptide fragments (length: 10 amino acids) was prepared using the sequences of the peptides and sequences in which sequences were added so as to flank each peptide in the amino acid sequences of allergy components comprising the sequences of the peptide. Epitope mapping was carried out using the library.

[0551] The peptides to be synthesized were shifted by one amino acid. Thus, each peptide had an overlap of 9 amino acids with each of the peptides previous and subsequent thereto.

[0552] The library was prepared by the same procedure as described above in (A), and the presence or absence of binding of an IgE antibody present in the serum of a patient to each peptide fragment was measured by the same technique as described above. Numeric values determined from images obtained as a result of carrying out only the procedures (1) and (4) to (6) described above in the subsection titled (3) Spotting of cellulose-bound peptide solution were used as control values. The control value of each peptide was subtracted from numeric values determined from images obtained from results about the serum of patients, and the obtained value of the difference was compared with values of the peptides serving as the basis of overlapping. It was determined that a peptide that lost or markedly decreased binding activity against IgE antibodies from patients as compared with the peptides shifted by one amino acid was a peptide having no binding activity against IgE antibodies.

[0553] Chemiluminescence intensity in images obtained by measurement was converted into a numeric value in the same manner as in (A). Numeric values determined from images obtained as a result of carrying out only the procedures (1) and (4) to (6) described above in the subsection titled (3) Spotting of cellulose-bound peptide solution (secondary antibody measurement values) were used as control values. The control value of each peptide was subtracted from numeric values determined from images obtained from results about the serum of patients. When values obtained using the sequences (SEQ ID NOs: 29, 131, 191, 281, 346, 414, 493, 562, 640, 706, 776, 899, 974, 1010, 1089, 1142, 1166, 1209, 1257, 1297, 1367, 1403, 1508, 1566, 1598, 1608, 1685, 1753, 1789, 1836, 1895, 1977, 2004, 2027, 2068, 2154, 2217, 2265, 2309, 2342, 2419, 2491, 2545, 2613, 2631, 2674, 2701, 2774, 2809 and 2830) serving as the basis of overlapping were defined as 100%, it was determined that: a peptide having a value of the difference that was less than 30% had no binding activity against IgE antibodies; a peptide having a value of the difference that was 30% or more and less than 50% had binding activity, albeit poor, against IgE antibodies; a peptide having a value of the difference that was 50% or more and less than 70% had binding activity, albeit somewhat poor, against IgE antibodies; and a peptide having a value of the difference that was 70% or more had equivalent or good binding activity against IgE antibodies and was thus a peptide had remaining binding activity against IgE antibodies.

[0554] This analysis found regions important for binding to IgE antibodies from patients, in the sequences serving as the basis of overlapping.

### (C) Wheat Epitope Mapping (3): Alanine/Glycine Scanning

[0555] From the amino acid sequences identified above in (A), a library of peptide fragments in which amino-terminal amino acids were substituted one by one by alanine (or glycine when the original amino acid was alanine) according to a technique called alanine/glycine scanning (Non Patent Literature 5) was prepared by the same technique as described above. The presence or absence of binding of an IgE antibody present in the serum of a patient to each peptide fragment was measured by the same technique as described above. Amino acids at positions where the binding activity against IgE antibodies from patients was lost or markedly decreased by the substitution by alanine/glycine were confirmed as amino acids important for exertion of original antigenicity, or amino acids influencing exertion of original antigenicity. Amino acids at positions where the binding activity against IgE antibodies from patients was neither lost nor markedly decreased were confirmed as substitutable amino acids that were not important for exertion of original antigenicity.

[0556] Chemiluminescence intensity in images obtained by measurement was converted into a numeric value in the same manner as in (A). Numeric values determined from images obtained from secondary antibody measurement values were used as control values. The control value of each peptide was subtracted from numeric values determined from images obtained from results about the serum of 49 patients. When values obtained using the sequences (SEQ ID NOs: 29, 131, 191, 281, 346, 414, 493, 562, 640, 706, 776, 899, 974, 1010, 1089, 1142, 1166, 1209, 1257, 1297, 1367, 1403, 1508, 1566, 1598, 1608, 1685, 1753, 1789, 1836, 1895, 1977, 2004, 2027, 2068, 2154, 2217, 2265, 2309, 2342, 2419, 2491, 2545, 2613, 2631, 2674, 2701, 2774, 2809 and 2830) serving as the basis of alanine/glycine scanning were defined as 100%, it was determined that: a peptide having a value of the difference that was less than 30% had no binding activity against IgE antibodies; a peptide having a value of the difference that was 30% or more and less than 50% had binding activity, albeit poor, against IgE antibodies; a peptide having a value of the difference that was 50% or more and less than 70% had binding activity, albeit somewhat poor, against IgE antibodies; and a peptide having a value of the difference that was 70% or more had equivalent or good binding activity against IgE antibodies and was thus a peptide had remaining binding activity against IgE antibodies.

[0557] By analysis of the results of (A) to (C), common sequences important for exertion of original antigenicity were found in regions important for binding to IgE antibodies from patients, in the sequences serving as the basis of alanine/glycine scanning. The sequences of all 50 types of epitopes were identified, and the results were summarized in Table 2.

### Example 5: Confirmation of Epitope Cross-Reactivity

[0558] Amino acids other than amino acids important for maintaining binding to IgE antibodies, in each of the epitope sequences found in the wheat proteins in Table 2 were defined as any given amino acid (X). NCBI was searched for proteins having the key sequences having the amino acid residues X in cooking ingredient allergens carried in common by each of the patients. As a result, an amino acid sequence contained in a sequence in each food described in the column “Food with which cross-reactivity was confirmed” in Table 2 was identified as one example.

[0559] The binding activity of peptides comprising the amino acid sequences described in the column “Synthesis sequence” and the rightmost column “SEQ ID NO” of Table 2 against IgE antibodies from patients having allergies to each food described in the column “Food with which cross-reactivity was confirmed” in Table 2 was confirmed by ELISA. The peptides were synthesized such that the peptides were N-terminally biotinylated by the Fmoc method.

[0560] To be specific, ELISA was carried out according to the following procedure.
[0561] (1) The concentrations of the biotinylated peptides were adjusted to 10 μg/mL with PBST (0.1% Tween 20).
[0562] (2) Each peptide solution was added at 20 μL to each well of a 384-well plate coated with streptavidin, and shaken at room temperature for one hour. After collection of the solution, the wells were washed with PBST five times.
[0563] (3) Pierce Protein-Free (PBS) Blocking Buffer (produced by Thermo) was added at 40 μL thereto and shaken at room temperature for one hour. After removal of the solution, the wells were washed with PBST five times.
[0564] (4) 2% serum/Canget SignalSolution I (produced by TOYOBO) was added at 20 μL thereto and shaken at room temperature for one hour. After removal of the solution, the wells were washed with PBST five times.
[0565] (5) A diluted secondary antibody solution (1:10000, Canget SignalSolution II (produced by TOYOBO)) was added at 20 μL thereto and shaken at room temperature for one hour. After removal of the solution, the wells were washed with PBST five times.
[0566] (6) 1-Step Ultra TMB-ELISA (produced by Thermo) was added at 20 μL thereto and shaken at room temperature for 15 minutes.
[0567] (7) 2 M H₂SO₄ was added at 20 μL thereto. Absorbance at 450 nm was measured.

[0568] Peptides having these amino acid sequences were prepared by the same procedure as described in Example 4 (A), and the presence or absence of binding thereto of IgE antibodies present in the serum of an allergic patient and the serum of a nonallergic subject was measured. The serum of two nonallergic subjects was measured, and values obtained by dividing the measurement values by an average value thereof were used.

[0569] The results are shown in FIGS. 3 to 6. The bar graph of each figure depicts “absorbance of the allergic patient/absorbance of the nonallergic patient (healthy subject)”. The names of the cooking ingredients described in each graph are the names of cooking ingredients containing a polypeptide comprising an amino acid sequence serving as the basis of each synthetic sequence used.

[0570] As is evident from FIGS. 3 to 6, all the polypeptides having the amino acid sequences described in the figures exhibited higher binding activity (larger than “1”) against an IgE antibody from each allergic patient than against an IgE antibody in the serum of a nonallergic subject. Thus, these polypeptides were confirmed to have cross-reactivity. This indicates that their epitopes can be used for detecting cross-reactivity with antigens other than wheat antigens. This further supports that the “X” moiety can assume any given amino acid residue.

What is claimed is:

1. A method for detecting binding between an antigen and an antibody,
wherein the antigen is a polypeptide being any one of the following:
(E1) a polypeptide comprising at least one amino acid sequence selected from the amino acid sequences of SEQ ID NOs: 29, 36, 37, 44, 50-53, 71, 79, 85, 88, 93, 94, 96, 98, 107, 121, 125-129, 2880;
(E3) a polypeptide comprising at least one amino acid sequence selected from the amino acid sequences of SEQ ID NOs: 191, 194, 195, 199, 208, 210-212, 214, 224, 225, 230, 233, 234, 239, 244, 249, 254, 260, 261, 264, 265, 275, 276, 2881;
(E8) a polypeptide comprising at least one amino acid sequence selected from the amino acid sequences of SEQ ID NOs: 562, 564, 565, 569-573, 575, 577-581, 583-587, 590-593, 595, 598, 599, 602, 603, 606, 607, 612-615, 618, 626, 627, 632, 635, 638;
(E18) a polypeptide comprising at least one amino acid sequence selected from the amino acid sequences of SEQ ID NOs: 1209, 1213, 1215, 1221, 1237, 1238; and
(E39) a polypeptide comprising at least one amino acid sequence selected from the amino acid sequences of SEQ ID NOs: 2309, 2311-2314, 2317, 2320, 2327, 2331, 2333-2335;
wherein said polypeptide as defined in any one of (E1), (E3), (E8), (E18) and (E39) specifically binds to an IgE antibody from serum from an allergic patient, and
said antibody specifically binds to any one of the amino acid sequence as defined in any one of (E1), (E3), (E8), (E18) and (E39), and
wherein the method comprises contacting the antibody in a sample obtained from a subject that binds to the antigen which is at least one of said polypeptide with the antigen from a kit,
wherein (i) antigen from the kit is immobilized to a carrier or a surface, or (ii) the kit further comprises a reagent that detects binding between said antigen and said antibody.

2. A method for diagnosing an allergy in a subject, wherein said allergy is an allergy to an antigen which is a polypeptide as defined in claim 1, the method comprising a step of detecting binding between the antigen and an antibody that binds to the antigen and is present in a sample obtained from the subject by the method according to claim 1 using a kit that comprises the antigen.

3. A method for treating an allergy, the method comprising administering at least one of the polypeptide as defined in claim 1 to a patient in deed of a treatment for an allergy.

4. The method according to claim 1, wherein the antigen is a polypeptide derived from wheat.

5. The method according to claim 1, further comprising providing an indicator for diagnosing an allergy in a subject,
wherein the sample is obtained from the subject, and
wherein the method further comprises detecting binding between an IgE antibody present in the sample and the antigen from the kit; and if the binding between the IgE antibody in the sample and the antigen from the kit is detected, an indicator of the fact that the subject is allergic is provided.

6. The method according to claim 1 an antigen and an antibody,
wherein the antigen is a polypeptide being any one of the following:
(E1-1) a polypeptide comprising at least one amino acid sequence selected from the amino acid sequences of SEQ ID NOs: 29, 36, 37, 44, 50-53, 71, 79, 85, 88, 93, 94, 96, 98, 107, 121, 125-129, 2880, and consisting of an amino acid sequence having at least 70% identity to the amino acid sequence of SEQ ID NO:18;
(E1-2) a polypeptide comprising at least one amino acid sequence selected from the amino acid sequences of SEQ ID NOs: 29, 36, 37, 44, 50-53, 71, 79, 85, 88, 93, 94, 96, 98, 107, 121, 125-129, 2880, and consisting of an amino acid sequence encoded by nucleotide sequence having at least 70% identity to the nucleotide sequence of SEQ ID NO: 17;
(E3-1) a polypeptide comprising at least one amino acid sequence selected from the amino acid sequences of SEQ ID NOs: 191, 194, 195, 199, 208, 210-212, 214, 224, 225, 230, 233, 234, 239, 244, 249, 254, 260, 261, 264, 265, 275, 276, 2881, and consisting of an amino acid sequence having at least 70% identity to the amino acid sequence of SEQ ID NO:18;
(E3-2) a polypeptide comprising at least one amino acid sequence selected from the amino acid sequences of SEQ ID NOs: 191, 194, 195, 199, 208, 210-212, 214, 224, 225, 230, 233, 234, 239, 244, 249, 254, 260, 261, 264, 265, 275, 276, 2881, and consisting of an amino acid sequence encoded by nucleotide sequence having at least 70% identity to the nucleotide sequence of SEQ ID NO: 17;
(E8-1) a polypeptide comprising at least one amino acid sequence selected from the amino acid sequences of SEQ ID NOs: 562, 564, 565, 569-573, 575, 577-581, 583-587, 590-593, 595, 598, 599, 602, 603, 606, 607, 612-615, 618, 626, 627, 632, 635, 638, and consisting of an amino acid sequence having at least 70% identity to the amino acid sequence of SEQ ID NO:18;
(E8-2) a polypeptide comprising at least one amino acid sequence selected from the amino acid sequences of SEQ ID NOs: 562, 564, 565, 569-573, 575, 577-581, 583-587, 590-593, 595, 598, 599, 602, 603, 606, 607, 612-615, 618, 626, 627, 632, 635, 638, and consisting of an amino acid sequence encoded by nucleotide sequence having at least 70% identity to the nucleotide sequence of SEQ ID NO: 17;
(E18-1) a polypeptide comprising at least one amino acid sequence selected from the amino acid sequences of SEQ ID NOs: 1209, 1213, 1215, 1221, 1237, 1238, and consisting of an amino acid sequence having at least 70% identity to the amino acid sequence of SEQ ID NO:18;
(E18-2) a polypeptide comprising at least one amino acid sequence selected from the amino acid sequences of SEQ ID NOs: 1209, 1213, 1215, 1221, 1237, 1238, and consisting of an amino acid sequence encoded by nucleotide sequence having at least 70% identity to the nucleotide sequence of SEQ ID NO: 17;
(E39-1) a polypeptide comprising at least one amino acid sequence selected from the amino acid sequences of SEQ ID NOs: 2309, 2311-2314, 2317, 2320, 2327, 2331, 2333-2335, and consisting of an amino acid sequence having at least 70% identity to the amino acid sequence of SEQ ID NO:18.
(E39-2) a polypeptide comprising at least one amino acid sequence selected from the amino acid sequences of SEQ ID NOs: 2309, 2311-2314, 2317, 2320, 2327, 2331, 2333-2335, and consisting of an amino acid sequence encoded by nucleotide sequence having at least 70% identity to the nucleotide sequence of SEQ ID NO: 17.

The application's sequence listing, which the Patent Office published only in electronic form, follows.

SEQUENCE LISTING (2946 sequences)

SEQ ID NO: 1 - DNA, 921 bp, Triticum aestivum
  source 1..921: mol_type = other DNA
  CDS 1..921: protein_id = 2933; transl_table = 1; translation = MKTFLILALLAIVATTARIAVRVPVPQLQPQNPSQQQPQEQVPLVQ QQQFPGQQQPFPPQQPYPQPQPFPSQQPYLQLQPFPQPQLPYPQPQLPYPQPQLPYPQP QPFRPQQPYPQSQPQYSQPQQPISQQQQQQQQQQQQKQQQQQQQQILQQILQQQLIPCR DVVLQQHSIAYGSSQVLQQSTYQLVQQLCCQQLWQIPEQSRCQAIHNVVHAIILHQQQQ QQQQQQQQPLSQVSFQQPQQQYPSGQGSFQPSQQNPQAQGSVQPQQLPQFEEIRNLALE TLPAMCNVYIPPYCTIAPVGIFGTN
atgaagacctttctcatccttgccctccttgctattgtagcaaccaccgccagaattgcagttagagttccagtgccacaattgcagccacaaaatccatctcagcaacaaccacaagagcaagttccattggtacaacaacaacaatttccagggcagcaacaaccatttccaccacaacagccatatccgcagccgcaaccatttccatcacaacaaccatatctgcagctgcaaccatttccgcagccgcaactaccatatccgcagccgcaactaccatatccgcagccgcaactaccatatccgcagccgcaaccatttcgaccacaacaaccatatccacaatcgcaaccacagtattcgcaaccacaacaaccaatttcgcagcagcagcagcagcaacaacaacaacaacaacaaaaacaacaacaacaacaacaacaacagatccttcaacaaattttgcaacaacaactgattccatgcagggatgttgtattgcaacaacacagcatagcgtatggaagctcacaagttttgcaacaaagtacttaccagctggtgcaacaattgtgttgtcagcagctgtggcagatccccgagcagtcgcggtgccaagccatccacaatgttgttcatgctattattctgcatcaacagcaacaacaacaacaacaacaacaacaacaaccgttgagccaggtctccttccaacagcctcaacaacaatatccatcaggccagggctccttccagccatctcagcaaaacccacaggcccagggctctgtccagcctcaacaactgccccagtttgaggaaataaggaacctagcgctagagacgctacctgcaatgtgcaatgtctatatccctccatattgcaccattgctccagttggcatcttcggtactaac

SEQ ID NO: 2 - protein, 307 aa, Triticum aestivum
MKTFLILALLAIVATTARIAVRVPVPQLQPQNPSQQQPQEQVPLVQQQQFPGQQQPFPPQQPYPQPQPFPSQQPYLQLQPFPQPQLPYPQPQLPYPQPQLPYPQPQPFRPQQPYPQSQPQYSQPQQPISQQQQQQQQQQQQKQQQQQQQQILQQILQQQLIPCRDVVLQQHSIAYGSSQVLQQSTYQLVQQLCCQQLWQIPEQSRCQAIHNVVHAIILHQQQQQQQQQQQQPLSQVSFQQPQQQYPSGQGSFQPSQQNPQAQGSVQPQQLPQFEEIRNLALETLPAMCNVYIPPYCTIAPVGIFGTN

SEQ ID NO: 3 - DNA, 1050 bp, Triticum aestivum
  source 1..1050: mol_type = other DNA
  CDS 1..1050: protein_id = 2934; transl_table = 1; translation = MKTFLIFALLAIAATSAIAQMETSRVPGLEKPWQQQPLPPQQQPPC SQQQQPFPQQQQPIIILQQSPFSQQQQPVLPQQQPVIILQQPPFSQQQQPVLPQQPPFS QQQQQQQQQQPPFSQQQQPVLPQQPPFSQQQQPPFSQQQQPSSQQPPFPQQHQQFPQQQ IPVVQPSVLQQLNPCKVFLQQQCSHVAMSQRLARSQMWQQSSCHVMQQQCCQQLPQIPE QSRSEAIRAIVYSIILQEQQQGFVQPQQQQPQQSGQGVSQHQQQSQQQQQLGQCSFQQP QQLQQLGQQPQQQQIPQGIFLQPHQISQLEVMTSIALRTLPTMCGVNVPLYSFDPLMPF SIGTGVGGY
atgaagaccttcctcatctttgctctccttgccattgcggcgacaagtgccattgcacaaatggagactagccgcgtccctggtttggagaaaccatggcagcaacaaccattaccaccacaacaacaaccaccatgttcacagcaacaacaaccatttccacagcaacaacaaccaattattatactgcaacaatcaccattttcgcagcaacaacaaccagttctgccgcaacagcaaccagttattatactgcaacaaccaccattttcgcagcaacaacaaccagttctaccacaacaaccaccattttcacaacaacaacaacaacaacaacaacaacaaccaccattttcgcagcaacaacaaccagttctaccacaacaaccaccattttcacaacaacaacaaccaccattttcgcagcagcaacaaccatcttcacaacaaccaccttttccacaacaacaccaacagtttccacaacaacaaatccctgttgttcaaccatccgttttgcagcagctaaacccatgcaaggtgttcctccaacagcagtgtagccatgtggcaatgtcgcaacgtcttgctaggtcacaaatgtggcaacagagtagttgccatgtgatgcaacaacaatgttgccaacagctgccgcaaatccccgaacaatcccgctctgaggcaatccgtgccatcgtctactccatcatcctgcaagaacaacaacagggttttgtccaacctcagcagcaacaaccccaacagtcgggccaaggtgtctcccaacaccaacagcagtcgcagcagcagcagcaactcggacagtgttctttccaacaacctcaacaactacaacaattgggtcagcagcctcaacaacaacagataccacagggtatattcttgcagccacaccagatatctcaacttgaggtgatgacttccattgcactccgtaccctgccaacgatgtgcggtgtcaacgtgccgttgtacagcttcgacccacttatgccatttagcattggcactggagttggtggctac

SEQ ID NO: 4 - protein, 350 aa, Triticum aestivum
MKTFLIFALLAIAATSAIAQMETSRVPGLEKPWQQQPLPPQQQPPCSQQQQPFPQQQQPIIILQQSPFSQQQQPVLPQQQPVIILQQPPFSQQQQPVLPQQPPFSQQQQQQQQQQPPFSQQQQPVLPQQPPFSQQQQPPFSQQQQPSSQQPPFPQQHQQFPQQQIPVVQPSVLQQLNPCKVFLQQQCSHVAMSQRLARSQMWQQSSCHVMQQQCCQQLPQIPEQSRSEAIRAIVYSIILQEQQQGFVQPQQQQPQQSGQGVSQHQQQSQQQQQLGQCSFQQPQQLQQLGQQPQQQQIPQGIFLQPHQISQLEVMTSIALRTLPTMCGVNVPLYSFDPLMPFSIGTGVGGY

SEQ ID NO: 5 - DNA, 981 bp, Triticum aestivum
  source 1..981: mol_type = other DNA
  CDS 1..981: protein_id = 2935; transl_table = 1; translation = MKTLLILTILAMAITIGTANIQVDPSGQVQWLQQQLVPQLQQPLSQ QPQQTFPQPQQTFPHQPQQQVPQPQQPQQPFLQPQQPFPQQPQQPFPQTQQPQQPFPQQ PQQPFPQTQQPQQPFPQQPQQPFPQTQQPQQPFPQLQQPQQPFPQPQQQLPQPQQPQQS FPQQQRPFIQPSLQQQLNPCKNILLQQSKPASLVSSLWSIIWPQSDCQVMRQQCCQQLA QIPQQLQCAAIHSVVHSIIMQQQQQQQQQQGIDIFLPLSQHEQVGQGSLVQGQGIIQPQ QPAQLEAIRSLVLQTLPSMCNVYVPPECSIMRAPFASIVAGIGGQ
atgaagaccttactcatcctgacaatccttgcgatggcaataaccatcggcaccgccaatatccaggtcgaccctagcggccaagtacaatggctacaacaacaactagtcccccagctccaacagccattatcccagcaaccacaacaaacatttccccaacctcaacaaacattcccccatcaaccacaacaacaagttccccagcctcagcaaccacaacaaccatttctccagccccaacaaccattcccccaacaaccacaacaaccattcccccagactcaacaaccacaacaaccatttccccagcaaccacaacaaccatttccccagactcaacaaccccaacaaccatttccccaacaaccacaacaaccattcccccagactcaacaaccccaacaaccatttccccagctccagcaaccacaacaaccttttccccagccccaacaacaattgccgcagccccaacaaccgcaacaatcattcccccaacaacaacggccattcattcaaccatctctacaacaacagttgaacccatgcaagaatatcctcttgcaacaatcgaaacctgcgtcattggtgtcatccctctggtcaataatctggccacaaagcgattgccaagtgatgcggcaacaatgctgccaacaactagcacagattcctcaacagctccagtgcgcagccatccatagcgtcgtgcattccatcatcatgcagcagcagcagcaacaacaacaacaacaaggcatcgatatctttctgccactatctcagcacgaacaggtgggtcaaggttctctagtccagggccagggcatcatccaaccacaacaaccagctcaattggaggcgatcagatcattggtgttgcaaactcttccatccatgtgcaacgtgtatgtcccacctgagtgctccatcatgagggcaccatttgccagcatagtcgcgggcattggtggccaa

SEQ ID NO: 6 - protein, 327 aa, Triticum aestivum
MKTLLILTILAMAITIGTANIQVDPSGQVQWLQQQLVPQLQQPLSQQPQQTFPQPQQTFPHQPQQQVPQPQQPQQPFLQPQQPFPQQPQQPFPQTQQPQQPFPQQPQQPFPQTQQPQQPFPQQPQQPFPQTQQPQQPFPQLQQPQQPFPQPQQQLPQPQQPQQSFPQQQRPFIQPSLQQQLNPCKNILLQQSKPASLVSSLWSIIWPQSDCQVMRQQCCQQLAQIPQQLQCAAIHSVVHSIIMQQQQQQQQQQGIDIFLPLSQHEQVGQGSLVQGQGIIQPQQPAQLEAIRSLVLQTLPSMCNVYVPPECSIMRAPFASIVAGIGGQ

SEQ ID NO: 7 - DNA, 1047 bp, Triticum aestivum
  source 1..1047: mol_type = other DNA
  CDS 1..1047: protein_id = 2936; transl_table = 1; translation = DELIKNAAYIGTPGKGILAADESTGTIGKRFASINVENVEDNRRAL RELLFCTPGALQYLSGVILFEETLYQSTKGGKPFVDILKAGNVLPGIKVDKGTIELAGT NGETTTQGFDDLGKRCAKYYEAGARFAKWRAVLKIGATEPSQLSIDQNAQGLARYAIIC QENGLVPIVEPEILVDGPHDIDRCAYVTEIVLAACYKALNDQHVLLEGTLLKPNMVTPG SDAKKVAPEVIAEYTVRTLQRTVPAAVPAIVFLSGGQSEEEATLNLNAMNKLQTKKPWN LSFSFGRALQQSTLKAWSGKTENEEKARTAFLVRCKANSEATLGTYKGDATLGEGASES LHVKDYKY
gatgagctcatcaagaacgctgcctacattggcacccctggcaagggtatcctcgctgctgatgagtccaccggcaccatcggcaagcgcttcgccagcatcaatgttgagaacgttgaggacaaccgccgtgccctccgtgagctcctcttctgcacccctggtgccctccagtacctcagcggtgtgatcctcttcgaggagaccctgtaccagagcaccaagggtggcaagcccttcgtcgacatcctcaaggcgggcaatgtcctccccggaatcaaggtggacaagggtaccatcgagcttgctggaaccaacggtgagaccaccacccagggctttgatgaccttggcaagcgctgcgccaagtactatgaggctggtgcccgcttcgccaagtggcgtgcagtccttaagatcggcgccaccgagccatcacagctctccatcgaccagaacgctcagggtctggctcgctatgccatcatctgccaggagaatgggctggtgcccattgttgagcctgagatccttgttgatggacctcatgacattgaccgctgtgcttacgtgactgagatcgtccttgctgcctgctacaaggccctcaacgaccagcatgtcctccttgagggcaccctcctgaagcccaacatggtcacccctggatccgacgccaagaaggtggcccctgaggtgattgctgagtacaccgtccgcaccctccagaggaccgtccctgctgccgtccccgccattgtcttcctctccggtggacagagtgaggaggaggcgaccctgaacctgaacgccatgaacaagctccagaccaagaagccctggaacctgtccttctccttcgggcgtgccctccagcagagcaccctcaaggcctggtccggcaagacggagaacgaggagaaggccaggacggcgttcctggtgaggtgcaaggccaactccgaggccacccttggcacctacaagggcgacgccacccttggcgagggcgcctctgagagcctccacgtcaaggactacaagtac

SEQ ID NO: 8 - protein, 349 aa, Triticum aestivum
DELIKNAAYIGTPGKGILAADESTGTIGKRFASINVENVEDNRRALRELLFCTPGALQYLSGVILFEETLYQSTKGGKPFVDILKAGNVLPGIKVDKGTIELAGTNGETTTQGFDDLGKRCAKYYEAGARFAKWRAVLKIGATEPSQLSIDQNAQGLARYAIICQENGLVPIVEPEILVDGPHDIDRCAYVTEIVLAACYKALNDQHVLLEGTLLKPNMVTPGSDAKKVAPEVIAEYTVRTLQRTVPAAVPAIVFLSGGQSEEEATLNLNAMNKLQTKKPWNLSFSFGRALQQSTLKAWSGKTENEEKARTAFLVRCKANSEATLGTYKGDATLGEGASESLHVKDYKY

SEQ ID NO: 9 - DNA, 939 bp, Triticum aestivum
  source 1..939: mol_type = other DNA
  CDS 1..939: protein_id = 2937; transl_table = 1; translation = MKTFLILALLAIVATTATTAVRVPVPQLQPQNPSQQQPQEQVPLVQ QQQFPGQQQQFPPQQPYPQPQPFPSQQPYLQLQPFPQPQPFPPQLPYPQPQSFPPQQPY PQQQPQYLQPQQPISQQQAQQQQQQQQQQQQQQQILQQILQQQLIPCRDVVLQQHNIAH ASSQVLQQSTYQLLQQLCCQQLLQIPEQSRCQAIHNVAHAIIMHQQQQQQQEQQQQLQQ QQQQQLQQQRQQPSSQVSFQQPQQQYPSSQVSFQPSQLNPQAQGPVQPQQLPQFAEIRN LALQTLPAMCNVYIPPHCSTTIAPFGIFGTN
atgaagacctttctcatccttgccctccttgctatcgtggcgaccaccgccacaactgcagttagagttccagtgccacaattgcagccacaaaatccatctcagcaacagccacaagagcaagttccattggtacaacaacaacaatttccagggcagcaacaacaatttccaccacaacagccatatccgcagccgcaaccatttccatcacaacaaccatatctgcaactgcagccatttccgcagccgcaaccatttccgccacaactaccatatccgcagccgcaatcatttccaccacaacaaccatatccacaacagcaaccacagtatctacaaccacaacaaccaatttcgcagcaacaagcacaacaacaacaacaacaacaacaacaacaacaacaacaacaacaaatccttcaacaaattttgcaacaacaactgattccatgcagggatgttgtcttgcaacaacacaacatagcgcatgcaagctcacaagttttgcaacaaagtacttaccagctattgcaacaattgtgttgtcaacaactgttgcagatccctgagcagtcgaggtgccaagccatccataatgttgctcatgctattattatgcatcaacaacaacaacaacaacaagaacaacaacaacagttgcaacaacaacaacagcagcaactgcaacaacaacgacaacaaccgtcgagccaggtctccttccaacagcctcagcagcaatatccatcaagccaggtctccttccagccatctcagctaaacccacaggctcagggccccgtccaacctcaacaactgccccagttcgcggaaataaggaacctagcgctacagacgctacctgcaatgtgcaatgtctacatccctccacattgctcgaccaccattgcgccatttggcatcttcggtaccaac

SEQ ID NO: 10 - protein, 313 aa, Triticum aestivum
MKTFLILALLAIVATTATTAVRVPVPQLQPQNPSQQQPQEQVPLVQQQQFPGQQQQFPPQQPYPQPQPFPSQQPYLQLQPFPQPQPFPPQLPYPQPQSFPPQQPYPQQQPQYLQPQQPISQQQAQQQQQQQQQQQQQQQILQQILQQQLIPCRDVVLQQHNIAHASSQVLQQSTYQLLQQLCCQQLLQIPEQSRCQAIHNVAHAIIMHQQQQQQQEQQQQLQQQQQQQLQQQRQQPSSQVSFQQPQQQYPSSQVSFQPSQLNPQAQGPVQPQQLPQFAEIRNLALQTLPAMCNVYIPPHCSTTIAPFGIFGTN

SEQ ID NO: 11 - DNA, 885 bp, Triticum aestivum
  source 1..885: mol_type = other DNA
  CDS 1..885: protein_id = 2938; transl_table = 1; translation = MKTFLILALLAIVATTATVAVRVPVPQLQPQNPSQQQPQEQVPLVQ QQQFPGQQQPFPPQQPYPQPQPFPSQQPYLQLQPFPQPQLPYPQPQPFRPQQPYPQPQP QYSQPQQPISQQQQQQQQQQQQQQQQQQQQPQQILQQILQQQLIPCMYVVLQQHSIAQG RSQVLQQSTYQLLQELCCQHLWQIPEQSQCQAIHNVVHAIILHQQQKQQQQQQQQPSSQ VSFQQPQQQYPLGQGSFRPSQQNPQAQGSVQPQQLPQFEEIRNLALQTLPAICNVYIPP YCTIAPFGIFGTN
atgaagacctttctcatccttgccctccttgctattgtagcaaccaccgccacagttgcagttagagttccagtgccacaattgcagccacaaaatccatctcagcaacaaccacaagagcaagttccattggtacaacaacagcaatttccagggcagcaacaaccatttccaccacaacagccatatccgcagccgcaaccatttccatcacaacaaccatatctgcagctgcaaccatttccgcagccgcaactaccatatccgcagccgcaaccatttcgaccacaacaaccatatccacaaccgcaaccacagtattcgcaaccacaacaaccaatttcacagcagcagcagcagcagcagcagcagcaacaacaacaacaacaacaacaacaacaacaaccacaacaaatccttcaacaaattttgcaacaacaactgattccatgcatgtatgttgtattgcagcaacacagcatagcgcaaggaagatcacaagttttgcaacaaagtacttaccagctgttgcaagaattgtgttgtcagcacctatggcagatccctgagcagtcgcagtgccaggccatccacaatgttgttcatgctattattctgcatcaacaacaaaaacaacaacaacaacaacaacaacaaccatcgagtcaggtctccttccaacagcctcagcaacaatatccattaggccagggctccttccggccatctcagcaaaacccacaggcccagggctctgtccagcctcaacaactgccccagttcgaggaaataaggaacctagcgctacagacactacctgcaatttgcaatgtctacatccctccatattgcaccatcgcgccatttggcatcttcggtactaac

SEQ ID NO: 12 - protein, 295 aa, Triticum aestivum
MKTFLILALLAIVATTATVAVRVPVPQLQPQNPSQQQPQEQVPLVQQQQFPGQQQPFPPQQPYPQPQPFPSQQPYLQLQPFPQPQLPYPQPQPFRPQQPYPQPQPQYSQPQQPISQQQQQQQQQQQQQQQQQQQQPQQILQQILQQQLIPCMYVVLQQHSIAQGRSQVLQQSTYQLLQELCCQHLWQIPEQSQCQAIHNVVHAIILHQQQKQQQQQQQQPSSQVSFQQPQQQYPLGQGSFRPSQQNPQAQGSVQPQQLPQFEEIRNLALQTLPAICNVYIPPYCTIAPFGIFGTN

SEQ ID NO: 13 - DNA, 1017 bp, Triticum aestivum
  source 1..1017: mol_type = other DNA
  CDS 1..1017: protein_id = 2939; transl_table = 1; translation = MKTLLILTIIAVALTTTTANIQVDPSGQVQWPQQQQPFPQPQQPFS QQPQQIFPQPQQTFPHQPQQAFPQPQQTFPHQPQQQFPQPQQPQQPFPQQPQQQFPQPQ QPQQPFPQQPQQQFPQPQQPQQPFPQPQQPQLPFPQQPQQPFPQPQQPQQPFPQLQQPQ QPLPQPQQPQQPFPQQQQPLIQPYLQQQMNPCKNYLLQQCNPVSLVSSLVSMILPRSDC KVMRQQCCQQLAQIPQQLQCAAIHGIVHSIIMQQEQQQQQQQQQQQQQQQGIQIMRPLF QLVQGQGIIQPQQPAQLEVIRSLVLGTLPTMCNVFVPPECSTTKAPFASIVADIGGQ
atgaagaccttactcatcctgacaatcattgcggtggcactaactaccaccaccgccaatatacaggtcgaccctagtggccaagtacaatggccacaacaacaacaaccattcccccagccccaacaaccattctcccaacaaccacaacaaatttttccccaaccccaacaaacattcccccatcaaccacaacaagcatttccccaaccccaacaaacattcccccatcaaccacaacaacaatttccccagccccagcaaccacaacaaccatttccccagcaaccacaacaacaatttccccagccccaacaaccacaacaaccatttccccagcaaccacaacaacaatttccccagccccaacaaccacaacaaccatttccccagccccaacaaccccaactaccatttccgcaacaaccacaacaaccattcccccagcctcaacaaccccaacaaccatttccccagttacagcaaccacaacaacctttaccccagccccaacaaccgcaacaaccattcccccagcaacaacaaccattgattcagccatacctacaacaacagatgaacccctgcaagaattacctcttgcagcaatgcaaccctgtgtcattggtgtcatccctcgtgtcaatgatcttgccacgaagtgattgcaaggtgatgcggcaacaatgttgccaacaactagcacagattcctcagcagctccagtgcgcagccatccatggcatcgtgcattccatcatcatgcagcaagaacaacaacaacaacaacaacaacaacaacaacaacaacaacaacaaggcatacagatcatgcggccactatttcagctcgtccagggtcagggcatcatccaacctcaacaaccagctcaattggaggtgatcaggtcattggtattgggaactcttccaaccatgtgcaacgtgtttgttccacctgagtgctccaccaccaaggcaccatttgccagcatagtcgccgacattggtggccaa

SEQ ID NO: 14 - protein, 339 aa, Triticum aestivum
MKTLLILTIIAVALTTTTANIQVDPSGQVQWPQQQQPFPQPQQPFSQQPQQIFPQPQQTFPHQPQQAFPQPQQTFPHQPQQQFPQPQQPQQPFPQQPQQQFPQPQQPQQPFPQQPQQQFPQPQQPQQPFPQPQQPQLPFPQQPQQPFPQPQQPQQPFPQLQQPQQPLPQPQQPQQPFPQQQQPLIQPYLQQQMNPCKNYLLQQCNPVSLVSSLVSMILPRSDCKVMRQQCCQQLAQIPQQLQCAAIHGIVHSIIMQQEQQQQQQQQQQQQQQQGIQIMRPLFQLVQGQGIIQPQQPAQLEVIRSLVLGTLPTMCNVFVPPECSTTKAPFASIVADIGGQ

SEQ ID NO: 15 - DNA, 876 bp, Triticum aestivum
  source 1..876: mol_type = other DNA
  CDS 1..876: protein_id = 2940; transl_table = 1; translation = MKTFLILALLAIVATTTTTAVRVPVPQLQPQNPSQQQPQEQVPLVQ QQQFLGQQQQQFPGQQQPFPPQQPYPQPQPFLPQLPYPQPQPFPPQQSYPQPQPQYPQP QQPISQQQAQLQQQQQQQQQQQQQILQQILQQQLIPCRDVVLQQPNIAHASSKVSQQSY QLLQQLCCLQLWQTPEQSRCQAIHNVIHAIILHHQQQQQQQQQQQQQQQQPSSQVSYQQ PQQQYPSGQGFFQPSQQNPQAQGFVQPQQLPQFEEIRNLALQTLPAMCNVYIPPYCSTT IAPFGIMSTN
atgaagacctttctcatccttgccctccttgctatcgtggcgaccaccaccacaactgcagttagagttccagtgccacaattgcagccacaaaatccatctcagcaacaaccacaagagcaagttccattggtgcaacaacaacaatttctagggcagcaacaacaacaatttccagggcaacaacaaccatttccaccacaacagccatatccgcagccgcaaccatttctgccacaactaccatatccgcagccgcaaccatttccaccacaacaatcatatccacaaccacaaccacaatatccgcaaccacaacaaccaatttcgcagcaacaagcacaactacaacaacaacaacaacaacaacaacaacaacaacaacaaatccttcaacaaattctgcaacaacaactgattccatgcagggatgtcgtcttgcaacaacccaatatagcacatgcaagctcaaaagtatcgcaacaaagttaccaactgttgcaacaattatgttgtctgcaactgtggcagacccccgagcagtcacggtgccaagccatccacaatgtcattcatgctattattttgcatcatcaacaacaacaacaacaacaacaacaacaacaacaacaacaacaacaaccgtcgagccaggtctcctaccagcagcctcagcaacaatatccatcaggccagggcttcttccagccatctcagcaaaacccacaggcccagggctttgtccaacctcagcaactgccgcagttcgaggaaataaggaacctagcgctgcagacgctaccagcaatgtgcaatgtctacatccctccatattgctcgaccaccattgcgccatttggcatcatgagtactaac

SEQ ID NO: 16 - protein, 292 aa, Triticum aestivum
MKTFLILALLAIVATTTTTAVRVPVPQLQPQNPSQQQPQEQVPLVQQQQFLGQQQQQFPGQQQPFPPQQPYPQPQPFLPQLPYPQPQPFPPQQSYPQPQPQYPQPQQPISQQQAQLQQQQQQQQQQQQQILQQILQQQLIPCRDVVLQQPNIAHASSKVSQQSYQLLQQLCCLQLWQTPEQSRCQAIHNVIHAIILHHQQQQQQQQQQQQQQQQPSSQVSYQQPQQQYPSGQGFFQPSQQNPQAQGFVQPQQLPQFEEIRNLALQTLPAMCNVYIPPYCSTTIAPFGIMSTN

SEQ ID NO: 17 - DNA, 1095 bp, Triticum aestivum
  source 1..1095: mol_type = other DNA
  CDS 1..1095: protein_id = 2941; transl_table = 1; translation = MKTFLIFALLAVAATSAIAQMETSHIPGLEKPSQQQPLPLQQILWY HQQQPIQQQPQPFPQQPPCSQQQQPPLSQQQQPPFSQQQPPFSQQELPILPQQPPFSQQ QQPQFSQQQQPFPQQQQPLLLQQPPFSQQRPPFSQQQQQPVLPQQPPFSQQQQQQPILP QQPPFSQHQQPVLPQQQIPYVQPSILQQLNPCKVFLQQQCSPVAMPQSLARSQMLWQSS CHVMQQQCCQQLPRIPEQSRYDAIRAIIYSIVLQEQQHGQGFNQPQQQQPQQSVQGVSQ PQQQQKQLGQCSFQRPQQQQLGQWPQQQQVPQGTLLQPHQIAQLELMTSIALRTLPMMC SVNVPVYGTTTSVPFGVGTQVGAY
atgaagaccttcctcatctttgccctccttgccgttgcagcgacaagtgccattgcacaaatggagactagccacatccctggcttggagaaaccatcgcaacaacaaccattaccactacaacaaatattatggtaccaccaacagcaaccgatccaacaacaaccacaaccatttccacaacagccaccatgttcacagcaacaacaaccaccattatcgcagcaacaacaaccaccattttcacagcaacaaccaccattctcgcagcaagaactaccaattctaccgcaacaaccaccattttcgcagcaacaacaaccacaattttcgcagcaacaacaaccattcccgcagcaacaacaaccacttctactgcaacaacccccattttcacaacaacgaccaccattttctcagcagcagcaacaaccagttctaccgcaacaaccaccattttcgcaacagcaacaacaacaaccaattctaccgcaacaaccacctttttcgcaacaccaacaaccggttcttccgcaacaacaaataccatatgttcagccatctatcttgcagcagctaaacccatgcaaggtattcctccagcagcaatgcagccctgtggcaatgccacaaagtcttgctaggtcgcaaatgttgtggcagagcagttgccatgtgatgcagcaacaatgttgccagcagctgccgcgaatccccgaacaatcacgctatgatgcaatccgtgccatcatctactcgatcgtcctacaagaacaacaacatggtcagggtttcaaccaacctcagcagcaacaaccccaacagtcggtccaaggtgtctcccaaccccaacaacaacagaagcagctcggacagtgttctttccaacgacctcaacaacaacaactgggtcaatggcctcaacaacaacaggtaccacagggtaccttgttgcagccacaccaaatagctcaacttgagttgatgacttccattgcactccgtaccctgccaatgatgtgcagtgtcaacgtgccggtgtacggcaccaccactagtgtgccattcggcgttggcacccaagttggtgcctac

SEQ ID NO: 18 - protein, 365 aa, Triticum aestivum
MKTFLIFALLAVAATSAIAQMETSHIPGLEKPSQQQPLPLQQILWYHQQQPIQQQPQPFPQQPPCSQQQQPPLSQQQQPPFSQQQPPFSQQELPILPQQPPFSQQQQPQFSQQQQPFPQQQQPLLLQQPPFSQQRPPFSQQQQQPVLPQQPPFSQQQQQQPILPQQPPFSQHQQPVLPQQQIPYVQPSILQQLNPCKVFLQQQCSPVAMPQSLARSQMLWQSSCHVMQQQCCQQLPRIPEQSRYDAIRAIIYSIVLQEQQHGQGFNQPQQQQPQQSVQGVSQPQQQQKQLGQCSFQRPQQQQLGQWPQQQQVPQGTLLQPHQIAQLELMTSIALRTLPMMCSVNVPVYGTTTSVPFGVGTQVGAY

SEQ ID NO: 19 - DNA, 1383 bp, Triticum aestivum
  source 1..1383: mol_type = other DNA
  CDS 1..1383: protein_id = 2942; transl_table = 1; translation = MKSTVVRSPWLALALVLSLCLSLSFASWDAEDEGRGSRRWQEGGDE RRSGESGRPYHFGEESFREWAKSRHGHFKPSHYDADEIAFVREGEGVLVLLRNGKRESF CVREGDVFVIPAGSIVYSANTHRSKWFRVVMLLNPVSTPGSFQEFSPIGFGGEQPQSFF SVFSDEVIRAAFNTRQREDVDRVFETKSRGEGQISEGSEEQIRELSRSCSRGGRGGGGG SGSEKEDIQPRSLTGEKPRYSNKHGRFHQITGDQCHHLRKLDMDVTLVNITRGSMTALR YTTRSTRIYIVVEGRDGYFEMACPHVSSSGRSERREHEQEREREHGHGRRSEERGQEHG RRSEEEEHGHGGEQEKSRGYRQVRAQIKVGSVIVLPAGHPATFVAGNEGNLALLSFGVG ANNDEEVFVTGGNSVLKQLDEAAKALAFPQQARELADRVIRAQPESVFVPGPQQQRRVA DM
atgaagtccacggtagtaagatcgccatggctagcgctagccctcgtcctctccctgtgcctctccctctcgttcgcgtcgtgggatgccgaggacgaaggtaggggtagtaggaggtggcaagaagggggcgacgaaaggcggtccggcgaaagtggccggccgtaccacttcggcgaggagagcttccgggagtgggccaagtcgcggcacggccacttcaagcccagccactacgacgccgacgagatcgccttcgtgagggaaggcgagggcgtgctggtgctgctgaggaacgggaagcgggagtcgttctgcgtcagggagggcgacgtgttcgtgatcccggccgggtccatcgtgtactccgccaacacgcaccgctccaagtggttccgggtcgtcatgctcctcaaccccgtctccacgccgggcagcttccaggagttctcccctattgggtttggaggcgagcagccgcagtcgttcttcagcgtattcagcgacgaggttatccgggcggcatttaacactcggcagcgggaggatgtggacagagtgttcgagacgaagagcagaggtgagggtcagatatctgaggggtcggaggagcagatacgggagctgagcaggtcgtgctccaggggaggacgcggcggtggcggcgggtcgggttccgagaaggaggacatccagccgcgcagcctcaccggcgagaagccccgctactcgaacaagcacggcaggttccaccagatcaccggcgaccagtgccaccacctccgcaagctcgacatggatgtcaccctcgtcaacattacccggggctcgatgacggcgctgaggtacaccacccggtcgaccaggatctacatcgtcgtggaggggcgcgacggctacttcgagatggcgtgcccgcacgtctccagctccggccgttctgaacgccgggagcacgagcaggagcgcgagcgcgaacacggacacggcaggagaagcgaggagcgcgggcaggagcacggcaggaggagcgaggaggaggagcacggccacggcggcgagcaggagaaatcgaggggctacaggcaggtgagggcccagatcaaggtggggtcggtgatcgtgctccccgcgggccacccggcgacgttcgtggccgggaacgaggggaacctcgccctgctgtccttcggcgtgggcgccaacaacgacgaggaggtgttcgtgaccggcgggaacagcgtgctgaagcagctggacgaggcagccaaggcgctggcgttcccccagcaggcgagggagctggcggacagggtcatccgcgcgcagccggagtccgtgttcgtccccggcccgcagcagcagcgccgcgtcgccgacatg

SEQ ID NO: 20 - protein, 461 aa, Triticum aestivum
MKSTVVRSPWLALALVLSLCLSLSFASWDAEDEGRGSRRWQEGGDERRSGESGRPYHFGEESFREWAKSRHGHFKPSHYDADEIAFVREGEGVLVLLRNGKRESFCVREGDVFVIPAGSIVYSANTHRSKWFRVVMLLNPVSTPGSFQEFSPIGFGGEQPQSFFSVFSDEVIRAAFNTRQREDVDRVFETKSRGEGQISEGSEEQIRELSRSCSRGGRGGGGGSGSEKEDIQPRSLTGEKPRYSNKHGRFHQITGDQCHHLRKLDMDVTLVNITRGSMTALRYTTRSTRIYIVVEGRDGYFEMACPHVSSSGRSERREHEQEREREHGHGRRSEERGQEHGRRSEEEEHGHGGEQEKSRGYRQVRAQIKVGSVIVLPAGHPATFVAGNEGNLALLSFGVGANNDEEVFVTGGNSVLKQLDEAAKALAFPQQARELADRVIRAQPESVFVPGPQQQRRVADM

SEQ ID NO: 21 - DNA, 1764 bp, Triticum aestivum
  source 1..1764: mol_type = other DNA
  CDS 1..1764: protein_id = 2943; transl_table = 1; translation = MATRARVTIPLLFLLGTSLLFAAAVSASHDEEEDRRGGRSLQQCVQ RCQQDRPRYSHARCVQECRDDQQQHGRHEQEEQGRGHGRHGEGEREEEQGRGRGRHGQG EREEEQGRGRGRRGEGERDEEHGDGRRPYVFGPRSFRRIIRSDHGFVKALRPFDEVSRL LRGIRNYRVAIMEVNPRAFVVPGLTDADGVGYVAQGEGVLTVIENGEKRSYTVRQGDVI VAPAGSIMHLANTDGRRKLVIAKILHTISVPGKFQYFSAKPLLASLSKRVLTAALKTSD ERLGSLLGSRQGKEEEEKSISIVRASEEQLRELRRQASEGDQGHHWPLPPFRGDSRDTF NLLEQRPKIANRHGRLYEADARSFHALAQHDVRVAVANITPGSMTAPYLNTQSFKLAVV LEGEGEVEIVCPHLGRDSERREQEHGKGRWRSEEEEDDRRQQRRRGSGSESEEEQDQQR YETVRARVSRGSAFVVPPGHPVVEIASSRGSSNLQVVCFEINAERNERVWLAGRNNVIA KLDDPAQELTFGRPAREVQEVFRAKDQQDEGFVAGPEQQQEHERGDRRRGDRGRGDEAV EAFLRMATAAL
atggcgaccagagccagagtaaccatccctctcctcttcctcctgggcacaagccttctcttcgccgcggctgtttcggcctcccatgacgaggaggaggacaggcgcggtgggcgctcgctgcagcagtgcgtgcagcggtgccagcaggaccggccgcggtactctcatgcccggtgcgtgcaggagtgccgggacgaccagcagcagcacggaaggcacgagcaggaggagcagggccgcgggcatggccggcacggcgagggggagcgtgaggaggagcagggccgtggccgtggccggcacggccagggagagcgtgaggaggagcagggccgtggacgtgggcggcgcggcgagggagagcgtgatgaggagcacggggatggccggcggccgtacgtgttcggcccgcgcagcttccgccgcatcatccggagcgaccacgggttcgtcaaggcccttcgcccgttcgacgaagtgtccaggctcctccggggcatcaggaactaccgtgtcgccatcatggaggtgaacccgcgcgcgttcgtcgtgccgggactcacggacgcggacggcgtcggctacgtcgctcaaggcgagggggtgctgacggtgatcgagaacggcgagaagcggtcctacaccgtcaggcaaggcgatgtgatcgtggcgccggcggggtccatcatgcacctggccaacaccgacggccggaggaagctggtcatcgccaagattctccacaccatctccgtccccggcaagttccagtatttctcggccaagcctctcctcgctagtttgagcaaacgcgtgctcacagcggcgttaaagacctcggatgagcggctgggtagtctcttgggcagccgccaaggcaaggaggaggaggagaagtccatctccatcgtccgcgcgtcagaggagcagctccgcgagctgcgtcgccaggcgtccgagggtgaccagggccaccactggcctctccccccgttccgcggcgactcgcgcgacaccttcaacctcctggagcagcgccccaagatcgccaaccgccatggccgcctctacgaggccgacgcccgtagcttccacgccctcgcccaacacgacgtccgcgtcgccgtggccaacatcacgccgggttctatgaccgcaccctacctgaacacccagtcgttcaagctcgccgttgtgctggaaggcgagggcgaggtggagatcgtctgcccgcacctcggccgcgacagcgagcgccgcgagcaagagcacggcaagggcaggtggaggagcgaggaagaggaggacgaccggcggcagcaacgccgacgcgggtccggctccgagtcggaggaggagcaggaccagcagaggtacgagacggtccgcgcgcgggtgtcgcgcggctcggcgttcgtggtgccccccggccacccggtggtggagatcgcctcgtcccgcggcagcagcaacctccaggtggtgtgcttcgagatcaacgccgagaggaacgagcgggtgtggctcgccgggaggaacaacgtgatcgccaagctggacgaccccgcccaggagctcaccttcggcaggcccgcgagggaggtgcaggaggtgttccgcgccaaggatcagcaggacgagggcttcgtcgccggacccgagcagcagcaggagcatgagcgcggggaccgccgccgtggtgaccgcgggcgcggcgacgaagccgtggaggcgttcctgaggatggcaaccgccgcgctc

SEQ ID NO: 22 - protein, 588 aa, Triticum aestivum
MATRARVTIPLLFLLGTSLLFAAAVSASHDEEEDRRGGRSLQQCVQRCQQDRPRYSHARCVQECRDDQQQHGRHEQEEQGRGHGRHGEGEREEEQGRGRGRHGQGEREEEQGRGRGRRGEGERDEEHGDGRRPYVFGPRSFRRIIRSDHGFVKALRPFDEVSRLLRGIRNYRVAIMEVNPRAFVVPGLTDADGVGYVAQGEGVLTVIENGEKRSYTVRQGDVIVAPAGSIMHLANTDGRRKLVIAKILHTISVPGKFQYFSAKPLLASLSKRVLTAALKTSDERLGSLLGSRQGKEEEEKSISIVRASEEQLRELRRQASEGDQGHHWPLPPFRGDSRDTFNLLEQRPKIANRHGRLYEADARSFHALAQHDVRVAVANITPGSMTAPYLNTQSFKLAVVLEGEGEVEIVCPHLGRDSERREQEHGKGRWRSEEEEDDRRQQRRRGSGSESEEEQDQQRYETVRARVSRGSAFVVPPGHPVVEIASSRGSSNLQVVCFEINAERNERVWLAGRNNVIAKLDDPAQELTFGRPAREVQEVFRAKDQQDEGFVAGPEQQQEHERGDRRRGDRGRGDEAVEAFLRMATAAL

SEQ ID NO: 23 - DNA, 1341 bp, Triticum aestivum
  source 1..1341: mol_type = other DNA
  CDS 1..1341: protein_id = 2944; transl_table = 1; translation = MGKEKTHINIVVIGHVDSGKSTTTGHLIYKLGGIDKRVIERFEKEA AEMNKRSFKYAWVLDKLKAERERGITIDIALWKFETTKYYCTVIDAPGHRDFIKNMITG TSQADCAVLIIDSTTGGFEAGISKDGQTREHALLAFTLGVKQMICCCNKMDATTPKYSK ARYEEIVKEVSSYLKKVGYNPDKVPFVPISGFEGDNMIERSTNLDWYKGPTLLEALDQI NEPKRPSDKPLRLPLQDVYKIGGIGTVPVGRVETGVIKPGMVVTFGPTGLTTEVKSVEM HHESLLEALPGDNVGFNVKNVAVKDLKRGFVASNSKDDPAKEAANFTSQVIIMNHPGQI GNGYAPVLDCHTSHIAVKFAELVTKIDRRSGKELEALPKFLKNGDAGIVKMIPTKPMVV ETFATYPPLGRFAVRDMRQTVAVGVIKGVEKKDPTGAKVTKAAIKKK
atgggtaaggagaagactcacatcaacatcgtggtcattggccatgtcgactctggcaagtcgacgaccactggccacctgatctacaagcttggaggcattgacaagcgtgtcatcgagaggttcgagaaggaagccgctgagatgaacaagaggtctttcaagtacgcgtgggtgcttgacaagctcaaggccgagcgtgagagaggtatcaccatcgatattgctctctggaagttcgagaccaccaagtactactgcaccgtcattgatgcccctggtcaccgtgacttcatcaagaacatgatcaccggtacctcccaggctgactgtgctgttctcatcatcgactccaccactggtggttttgaggctggtatctccaaggatggccagacacgtgagcacgccctccttgctttcactcttggagtgaagcagatgatctgctgctgcaacaagatggacgccaccactcccaagtactcaaaggcgcgttatgaagaaattgtcaaggaggtctcttcctacctgaagaaggtcggctacaaccctgacaaggttcccttcgtccccatctctgggtttgagggtgacaacatgattgagaggtccaccaaccttgactggtacaagggcccaacccttcttgaggcgcttgaccagatcaacgagcccaagaggccctcagacaagcccctccgtcttcccctccaggacgtttacaagattggtggcattggaactgtgcctgttggccgtgttgagactggtgtcatcaagcctggtatggttgtcacctttggtcccactggtctgacaactgaggtcaagtccgttgagatgcaccatgagtctctcctggaggcgcttcctggtgacaacgttggcttcaatgtcaagaatgttgccgtgaaggatctgaagcgtggttttgttgcatccaactccaaggatgaccctgccaaggaggcagccaacttcacctcccaggtcatcatcatgaaccaccctggtcagattggcaacggctacgccccagtgctggactgccacacctcgcacattgctgtcaagtttgctgagctggtgaccaagatcgacaggcgatctggtaaggagctggaggccctgcccaagttcctcaagaatggtgatgctggcatagtgaagatgattcccaccaagcccatggttgtggagacctttgctacttacccacctcttggtcgttttgctgtccgtgacatgaggcaaactgtggctgttggtgtcatcaagggtgtggagaagaaggacccaaccggcgccaaggtgaccaaggctgccatcaagaagaaa

SEQ ID NO: 24 - protein, 447 aa, Triticum aestivum
MGKEKTHINIVVIGHVDSGKSTTTGHLIYKLGGIDKRVIERFEKEAAEMNKRSFKYAWVLDKLKAERERGITIDIALWKFETTKYYCTVIDAPGHRDFIKNMITGTSQADCAVLIIDSTTGGFEAGISKDGQTREHALLAFTLGVKQMICCCNKMDATTPKYSKARYEEIVKEVSSYLKKVGYNPDKVPFVPISGFEGDNMIERSTNLDWYKGPTLLEALDQINEPKRPSDKPLRLPLQDVYKIGGIGTVPVGRVETGVIKPGMVVTFGPTGLTTEVKSVEMHHESLLEALPGDNVGFNVKNVAVKDLKRGFVASNSKDDPAKEAANFTSQVIIMNHPGQIGNGYAPVLDCHTSHIAVKFAELVTKIDRRSGKELEALPKFLKNGDAGIVKMIPTKPMVVETFATYPPLGRFAVRDMRQTVAVGVIKGVEKKDPTGAKVTKAAIKKK

SEQ ID NO: 25 - DNA, 849 bp, Triticum aestivum
  source 1..849: mol_type = other DNA
  CDS 1..849: protein_id = 2945; transl_table = 1; translation = MKTFLILALLAIVATTATTAVRVPVPQLQPQNPSQQQPQEQVPLVQ QQQFLGQQQPFPPQQPYPQPQPFPSQQPYLQLQPFPQPQLPYSQPQPFRPQQPYPQPQP QYSQPQQPISQQQQQQQQQQQQQILQQILQQQLIPCRDVVLQQHNIAHASSQVLQQSSY QQLQQLCCQQLFQIPEQSRCQAIHNVVHAIILHHHQQQQQQPSSQVSYQQPQEQYPSGQ GSFQSSQQNPQAQGSVQPQQLPQFQEIRNLALQTLPAMCNVYIPPYCSTTIAPFGIFGT N
atgaagacctttctcatccttgccctccttgctatcgtggcgaccaccgccacaactgcagttagagttccagtgccacaattgcagccacaaaatccatctcagcaacagccacaagagcaagttccattggtacaacaacaacaatttctagggcagcaacaaccatttccaccacaacaaccatatccacagccgcaaccatttccatcacaacaaccatatctgcagctgcaaccatttccgcagccgcaactaccatattcgcagccacaaccatttcgaccacaacaaccatatccacaaccgcaaccacagtattcgcaaccacaacaaccaatttcacagcagcagcagcagcagcaacaacaacaacaacaacaaatccttcaacaaattctgcaacaacaactgattccatgcagggatgttgtcttgcaacaacacaacatagcgcatgcaagctcacaagtattgcaacaaagtagttaccaacagttgcaacaattatgttgtcagcaactgtttcagatccccgagcagtcgcggtgccaagccatccacaatgttgttcatgctattattctgcatcatcatcaacaacaacaacaacaaccgtcgagccaggtctcctaccagcagcctcaggaacaatatccatcaggccagggctccttccagtcatctcagcaaaacccacaggcccagggctctgtccagcctcaacaactgccccagttccaggaaataaggaacttagcgctgcagacgctgccagcaatgtgcaatgtctacatccctccatattgctcgaccaccattgcgccatttggcatcttcggtaccaac

SEQ ID NO: 26 - protein, 283 aa, Triticum aestivum
MKTFLILALLAIVATTATTAVRVPVPQLQPQNPSQQQPQEQVPLVQQQQFLGQQQPFPPQQPYPQPQPFPSQQPYLQLQPFPQPQLPYSQPQPFRPQQPYPQPQPQYSQPQQPISQQQQQQQQQQQQQILQQILQQQLIPCRDVVLQQHNIAHASSQVLQQSSYQQLQQLCCQQLFQIPEQSRCQAIHNVVHAIILHHHQQQQQQPSSQVSYQQPQEQYPSGQGSFQSSQQNPQAQGSVQPQQLPQFQEIRNLALQTLPAMCNVYIPPYCSTTIAPFGIFGTN

SEQ ID NO: 27 - DNA, 981 bp, Triticum aestivum
  source 1..981: mol_type = other DNA
  CDS 1..981: protein_id = 2946; transl_table = 1; translation = MKIFMVFALLVASTTITTATAQLDPRIHDQERPQQSFLQQQPLIQQ QPYPPQEPQQPLFPQKEPQQPFPLQQPQYQQQQPYPQQPLPQEQLPQQHLFPQQPPQQQ FPQQMPLPHQQQTFPQQQQQQQQQEQLPQQLPQFPQQQPFSQYQQPLTQQPYSQEQPLP QQQPSVEEKQQLNLCKEFLLQQCNPEEKLSLLQSVIPFLRPKTSQQNSCQLKRLQCCRQ LAHISEPSRCPAIHNIVHAIVMQQQHVDRGFGQPQPQQLGQEMPMQPQHQLGQHSILPQ QLAQYKLVRLLVIQTLPMLCNVHVPSDCYTITAPFGSMTAYNGGQ
atgaagatcttcatggtctttgccctcctcgttgcatcaacgaccatcaccaccgcgaccgcacagctcgaccctcgcatccatgaccaagaaaggccacaacaatcgtttctgcaacagcaaccacttatccagcaacaaccatacccgcctcaagagccacaacaaccactattcccgcaaaaagagccacaacaaccatttccgctgcagcagccacaataccagcaacaacaaccgtatccacaacaaccacttccccaagaacaacttccccagcaacatttatttccgcagcagccgccacaacaacaatttccacaacagatgccacttccgcatcaacaacaaacattcccgcaacaacaacaacaacaacaacaacaagaacaactcccacaacaactcccacaattcccgcaacaacaaccattttcccaatatcaacaaccattaacacaacaaccatactcgcaagagcaaccattgccacaacaacaaccttctgtagaggaaaaacaacaattgaacttgtgcaaggagttcctcctgcagcagtgtaacccagaggagaaactgtcgttactccagtcagtgatcccgttcctccgaccaaagacctcgcaacagaacagctgccagttgaagcgactacaatgttgtcgacaacttgcacatatcagtgaaccgtcccgatgcccggccatccacaacattgtgcatgccatcgtcatgcaacaacaacatgtggatagaggtttcggccagcctcaaccacaacagttgggccaggaaatgcccatgcagcctcaacatcaattgggccagcactctatcctacctcaacaactagcccagtacaagttggttaggttacttgtgattcagacccttcctatgttatgcaacgtgcatgtcccgtctgattgctacaccattactgcaccatttggtagcatgactgcctacaatggtggacaa

SEQ ID NO: 28 - protein, 327 aa, Triticum aestivum
MKIFMVFALLVASTTITTATAQLDPRIHDQERPQQSFLQQQPLIQQQPYPPQEPQQPLFPQKEPQQPFPLQQPQYQQQQPYPQQPLPQEQLPQQHLFPQQPPQQQFPQQMPLPHQQQTFPQQQQQQQQQEQLPQQLPQFPQQQPFSQYQQPLTQQPYSQEQPLPQQQPSVEEKQQLNLCKEFLLQQCNPEEKLSLLQSVIPFLRPKTSQQNSCQLKRLQCCRQLAHISEPSRCPAIHNIVHAIVMQQQHVDRGFGQPQPQQLGQEMPMQPQHQLGQHSILPQQLAQYKLVRLLVIQTLPMLCNVHVPSDCYTITAPFGSMTAYNGGQ

SEQ ID NO: 29 - protein, 15 aa, synthetic construct
  REGION 1..15: note = epitope
QQILWYHQQQPIQQQ

SEQ ID NO: 30 - protein, 4 aa, synthetic construct
  REGION 1..4: note = epitope
QPIQ

SEQ ID NO: 31 - protein, 15 aa, synthetic construct
  REGION 1..15: note = epitope
  REGION 1..7: note = misc_feature - Xaa can be any naturally occurring amino acid
  SITE 10: note = misc_feature - Xaa can be any naturally occurring amino acid
XXXXXXXQQXPIQQQ

SEQ ID NO: 32 - protein, 15 aa, synthetic construct
  REGION 1..15: note = epitope
  REGION 1..8: note = misc_feature - Xaa can be any naturally occurring amino acid
  REGION 10..11: note = misc_feature - Xaa can be any naturally occurring amino acid
XXXXXXXXQXXIQQQ

SEQ ID NO: 33 - protein, 15 aa, synthetic construct
  REGION 1..15: note = epitope
  REGION 1..11: note = misc_feature - Xaa can be any naturally occurring amino acid
XXXXXXXXXXXIQQQ

SEQ ID NO: 34 - protein, 6 aa, synthetic construct
  REGION 1..6: note = epitope
QQPIQQ

SEQ ID NO: 35 - protein, 6 aa, synthetic construct
  REGION 1..6: note = epitope
  SITE 1: note = misc_feature - Xaa can be any naturally occurring amino acid
  SITE 3: note = misc_feature - Xaa can be any naturally occurring amino acid
XQXIQQ

SEQ ID NO: 36 - protein, 15 aa, synthetic construct
  REGION 1..15: note = epitope
  REGION 1..5: note = misc_feature - Xaa can be any naturally occurring amino acid
  SITE 7: note = misc_feature - Xaa can be any naturally occurring amino acid
  SITE 10: note = misc_feature - Xaa can be any naturally occurring amino acid
XXXXXYXQQXPIQQQ

SEQ ID NO: 37 - protein, 15 aa, synthetic construct
  REGION 1..15: note = epitope
  REGION 1..5: note = misc_feature - Xaa can be any naturally occurring amino acid
  SITE 7: note = misc_feature - Xaa can be any naturally occurring amino acid
  REGION 10..11: note = misc_feature - Xaa can be any naturally occurring amino acid
XXXXXYXQQXXIQQQ

SEQ ID NO: 38 - protein, 15 aa, synthetic construct
  REGION 1..15: note = epitope
  REGION 1..7: note = misc_feature - Xaa can be any naturally occurring amino acid
  REGION 9..11: note = misc_feature - Xaa can be any naturally occurring amino acid
  SITE 15: note = misc_feature - Xaa can be any naturally occurring amino acid
XXXXXXXQXXXIQQX

SEQ ID NO: 39 - protein, 8 aa, synthetic construct
  REGION 1..8: note = epitope
HQQQPIQQ

SEQ ID NO: 40 - protein, 7 aa, synthetic construct
  REGION 1..7: note = epitope
QQQPIQQ

SEQ ID NO: 41 - protein, 6 aa, synthetic construct
  REGION 1..6: note = epitope
QQQPIQ

SEQ ID NO: 42 - protein, 6 aa, synthetic construct
  REGION 1..6: note = epitope
  SITE 3: note = misc_feature - Xaa can be any naturally occurring amino acid
QQXPIQ

SEQ ID NO: 43 - protein, 6 aa, synthetic construct
  REGION 1..6: note = epitope
  REGION 3..4: note = misc_feature - Xaa can be any naturally occurring amino acid
QQXXIQ

SEQ ID NO: 44 - protein, 15 aa, synthetic construct
  REGION 1..15: note = epitope
  REGION 1..5: note = misc_feature - Xaa can be any naturally occurring amino acid
  SITE 7: note = misc_feature - Xaa can be any naturally occurring amino acid
  REGION 9..11: note = misc_feature - Xaa can be any naturally occurring amino acid
  SITE 15: note = misc_feature - Xaa can be any naturally occurring amino acid
XXXXXYXQXXXIQQX

SEQ ID NO: 45 - protein, 15 aa, synthetic construct
  REGION 1..15: note = epitope
  REGION 1..7: note = misc_feature - Xaa can be any naturally occurring amino acid
  REGION 9..11: note = misc_feature - Xaa can be any naturally occurring amino acid
  SITE 15: note = misc_feature - Xaa can be any naturally occurring amino acid
XXXXXXXQXXXIQQX

SEQ ID NO: 46 - protein, 7 aa, synthetic construct
  REGION 1..7: note = epitope
QQQPIQQ

SEQ ID NO: 47 - protein, 7 aa, synthetic construct
  REGION 1..7: note = epitope
  REGION 2..4: note = misc_feature - Xaa can be any naturally occurring amino acid
QXXXIQQ

SEQ ID NO: 48 - protein, 6 aa, synthetic construct
  REGION 1..6: note = epitope
QQPIQQ

SEQ ID NO: 49 - protein, 5 aa, synthetic construct
  REGION 1..5: note = epitope
QQPIQ

SEQ ID NO: 50 - protein, 15 aa, synthetic construct
  REGION 1..15: note = epitope
  REGION 2..4: note = misc_feature - Xaa can be any naturally occurring amino acid
  SITE 10: note = misc_feature - Xaa can be any naturally occurring amino acid
QXXXWYHQQXPIQQQ

SEQ ID NO: 51 - protein, 15 aa, synthetic construct
  REGION 1..15: note = epitope
  REGION 1..5: note = misc_feature - Xaa can be any naturally occurring amino acid
  SITE 10: note = misc_feature - Xaa can be any naturally occurring amino acid
XXXXXYHQQXPIQQQ

SEQ ID NO: 52 - protein, 15 aa, synthetic construct
  REGION 1..15: note = epitope
  REGION 1..5: note = misc_feature - Xaa can be any naturally occurring amino acid
  REGION 7..11: note = misc_feature - Xaa can be any naturally occurring amino acid
XXXXXYXXXXXIQQQ

SEQ ID NO: 53 - protein, 9 aa, synthetic construct
  REGION 1..9: note = epitope
YHQQQPIQQ

SEQ ID NO: 54 - protein, 8 aa, synthetic construct
  REGION 1..8: note = epitope
HQQQPIQQ

SEQ ID NO: 55 - protein, 8 aa, synthetic construct
  REGION 1..8: note = epitope
  SITE 4: note = misc_feature - Xaa can be any naturally occurring amino acid
HQQXPIQQ

SEQ ID NO: 56 - protein, 7 aa, synthetic construct
  REGION 1..7: note = epitope
QQQPIQQ

SEQ ID NO: 57 - protein, 5 aa, synthetic construct
  REGION 1..5: note = epitope
QPIQQ

SEQ ID NO: 58 - protein, 4 aa, synthetic construct
  REGION 1..4: note = epitope
PIQQ

SEQ ID NO: 59 - protein, 5 aa, synthetic construct
  REGION 1..5: note = epitope
QPIQQ

SEQ ID NO: 60 - protein, 6 aa, synthetic construct
  REGION 1..6: note = epitope
QQPIQQ

SEQ ID NO: 61 - protein, 4 aa, synthetic construct
  REGION 1..4: note = epitope
QPIQ

SEQ ID NO: 62 - protein, 15 aa, synthetic construct
  REGION 1..15: note = epitope
  REGION 1..5: note = misc_feature - Xaa can be any naturally occurring amino acid
  SITE 7: note = misc_feature - Xaa can be any naturally occurring amino acid
  REGION 9..11: note = misc_feature - Xaa can be any naturally occurring amino acid
  SITE 15: note = misc_feature - Xaa can be any naturally occurring amino acid
XXXXXYXQXXXIQQX

SEQ ID NO: 63 - protein, 7 aa, synthetic construct
  REGION 1..7: note = epitope
QQQPIQQ

SEQ ID NO: 64 - protein, 7 aa, synthetic construct
  REGION 1..7: note = epitope
  REGION 2..4: note = misc_feature - Xaa can be any naturally occurring amino acid
QXXXIQQ

SEQ ID NO: 65 - protein, 6 aa, synthetic construct
  REGION 1..6: note = epitope
QQQPIQ

SEQ ID NO: 66 - protein, 7 aa, synthetic construct
  REGION 1..7: note = epitope
QQQPIQQ

SEQ ID NO: 67 - protein, 7 aa, synthetic construct
  REGION 1..7: note = epitope
  REGION 2..3: note = misc_feature - Xaa can be any naturally occurring amino acid
QXXPIQQ

SEQ ID NO: 68 - protein, 7 aa, synthetic construct
  REGION 1..7: note = epitope
QQQPIQQ

SEQ ID NO: 69 - protein, 7 aa, synthetic construct
  REGION 1..7: note = epitope
  REGION 2..4: note = misc_feature - Xaa can be any naturally occurring amino acid
QXXXIQQ

SEQ ID NO: 70 - protein, 6 aa, synthetic construct
  REGION 1..6: note = epitope
QQQPIQ

SEQ ID NO: 71 - protein, 15 aa, synthetic construct
  REGION 1..15: note = epitope
  REGION 1..3: note = misc_feature - Xaa can be any naturally occurring amino acid
  SITE 5: note = misc_feature - Xaa can be any naturally occurring amino acid
  SITE 7: note = misc_feature - Xaa can be any naturally occurring amino acid
  REGION 9..10: note = misc_feature - Xaa can be any naturally occurring amino acid
  SITE 15: note = misc_feature - Xaa can be any naturally occurring amino acid
XXXLXYXQXXPIQQX

SEQ ID NO: 72 - protein, 15 aa, synthetic construct
  REGION 1..15: note = epitope
  REGION 1..7: note = misc_feature - Xaa can be any naturally occurring amino acid
  REGION 9..10: note = misc_feature - Xaa can be any naturally occurring amino acid
  SITE 15: note = misc_feature - Xaa can be any naturally occurring amino acid
XXXXXXXQXXPIQQX

SEQ ID NO: 73 - protein, 8 aa, synthetic construct
  REGION 1..8: note = epitope
HQQQPIQQ

SEQ ID NO: 74 - protein, 7 aa, synthetic construct
  REGION 1..7: note = epitope
QQQPIQQ

SEQ ID NO: 75 - protein, 6 aa, synthetic construct
  REGION 1..6: note = epitope
QQQPIQ

SEQ ID NO: 76 - protein, 6 aa, synthetic construct
  REGION 1..6: note = epitope
  REGION 2..3: note = misc_feature - Xaa can be any naturally occurring amino acid
QXXPIQ

SEQ ID NO: 77 - protein, 7 aa, synthetic construct
  REGION 1..7: note = epitope
QQQPIQQ

SEQ ID NO: 78 - protein, 7 aa, synthetic construct
  REGION 1..7: note = epitope
  REGION 2..3: note = misc_feature - Xaa can be any naturally occurring amino acid
QXXPIQQ

SEQ ID NO: 79 - protein, 6 aa, synthetic construct
  REGION 1..6: note = epitope
QQILWY

SEQ ID NO: 80 - protein, 7 aa, synthetic construct
  REGION 1..7: note = epitope
QQQPIQQ

SEQ ID NO: 81 - protein, 5 aa, synthetic construct
  REGION 1..5: note = epitope
QQPIQ

SEQ ID NO: 82 - protein, 7 aa, synthetic construct
  REGION 1..7: note = epitope
QQQPIQQ

SEQ ID NO: 83 - protein, 7 aa, synthetic construct
  REGION 1..7: note = epitope
  REGION 2..3: note = misc_feature - Xaa can be any naturally occurring amino acid
QXXPIQQ

SEQ ID NO: 84 - protein, 7 aa, synthetic construct
  REGION 1..7: note = epitope
  REGION 2..4: note = misc_feature - Xaa can be any naturally occurring amino acid
QXXXIQQ

SEQ ID NO: 85 - protein, 10 aa, synthetic construct
  REGION 1..10: note = epitope
QQILWYHQQQ

SEQ ID NO: 86 - protein, 7 aa, synthetic construct
  REGION 1..7: note = epitope
QQQPIQQ

SEQ ID NO: 87 - protein, 6 aa, synthetic construct
  REGION 1..6: note = epitope
QQQPIQ

SEQ ID NO: 88 - protein, 7 aa, synthetic construct
  REGION 1..7: note = epitope
QQILWYH

SEQ ID NO: 89 - protein, 5 aa, synthetic construct
  REGION 1..5: note = epitope
QQPIQ

SEQ ID NO: 90 - protein, 15 aa, synthetic construct
  REGION 1..15: note = epitope
  REGION 1..7: note = misc_feature - Xaa can be any naturally occurring amino acid
  REGION 9..10: note = misc_feature - Xaa can be any naturally occurring amino acid
  SITE 15: note = misc_feature - Xaa can be any naturally occurring amino acid
XXXXXXXQXXPIQQX

SEQ ID NO: 91 - protein, 5 aa, synthetic construct
  REGION 1..5: note = epitope
QPIQQ

SEQ ID NO: 92 - protein, 5 aa, synthetic construct
  REGION 1..5: note = epitope
  SITE 1: note = misc_feature - Xaa can be any naturally occurring amino acid
XPIQQ

SEQ ID NO: 93 - protein, 15 aa, synthetic construct
  REGION 1..15: note = epitope
  SITE 5: note = misc_feature - Xaa can be any naturally occurring amino acid
QQILXYHQQQPIQQQ

SEQ ID NO: 94 - protein, 15 aa, synthetic construct
  REGION 1..15: note = epitope
  REGION 4..5: note = misc_feature - Xaa can be any naturally occurring amino acid
  SITE 10: note = misc_feature - Xaa can be any naturally occurring amino acid
QQIXXYHQQXPIQQQ

SEQ ID NO: 95 - protein, 9 aa, synthetic construct
  REGION 1..9: note = epitope
YHQQQPIQQ

SEQ ID NO: 96 - protein, 9 aa, synthetic construct
  REGION 1..9: note = epitope
  SITE 5: note = misc_feature - Xaa can be any naturally occurring amino acid
YHQQXPIQQ

SEQ ID NO: 97 - protein, 15 aa, synthetic construct
  REGION 1..15: note = epitope
  REGION 1..5: note = misc_feature - Xaa can be any naturally occurring amino acid
  SITE 7: note = misc_feature - Xaa can be any naturally occurring amino acid
  REGION 10..11: note = misc_feature - Xaa can be any naturally occurring amino acid
XXXXXYXQQXXIQQQ

SEQ ID NO: 98 - protein, 15 aa, synthetic construct
  REGION 1..15: note = epitope
  REGION 1..5: note = misc_feature - Xaa can be any naturally occurring amino acid
  REGION 7..8: note = misc_feature - Xaa can be any naturally occurring amino acid
  REGION 10..11: note = misc_feature - Xaa can be any naturally occurring amino acid
  SITE 15: note = misc_feature - Xaa can be any naturally occurring amino acid
XXXXXYXXQXXIQQX

SEQ ID NO: 99 - protein, 9 aa, synthetic construct
  REGION 1..9: note = epitope
YHQQQPIQQ

SEQ ID NO: 100 - protein, 7 aa, synthetic construct
  REGION 1..7: note = epitope
QQQPIQQ

SEQ ID NO: 101 - protein, 7 aa, synthetic construct
  REGION 1..7: note = epitope
  REGION 3..4: note = misc_feature - Xaa can be any naturally occurring amino acid
QQXXIQQ

SEQ ID NO: 102 - protein, 7 aa, synthetic construct
  REGION 1..7: note = epitope
  SITE 1: note = misc_feature - Xaa can be any naturally occurring amino acid
  REGION 3..4: note = misc_feature - Xaa can be any naturally occurring amino acid
XQXXIQQ

SEQ ID NO: 103 - protein, 7 aa, synthetic construct
  REGION 1..7: note = epitope
QQILWYH

SEQ ID NO: 104 - protein, 6 aa, synthetic construct
  REGION 1..6: note = epitope
QQQPIQ

SEQ ID NO: 105 - protein, 5 aa, synthetic construct
  REGION 1..5: note = epitope
QQQPI

SEQ ID NO: 106 - protein, 15 aa, synthetic construct
  REGION 1..15: note = epitope
  REGION 1..7: note = misc_feature - Xaa can be any naturally occurring amino acid
  SITE 10: note = misc_feature - Xaa can be any naturally occurring amino acid
  SITE 15: note = misc_feature - Xaa can be any naturally occurring amino acid
XXXXXXXQQXPIQQX

SEQ ID NO: 107 - protein, 5 aa, synthetic construct
  REGION 1..5: note = epitope
QILWY

SEQ ID NO: 108 - protein, 8 aa, synthetic construct
  REGION 1..8: note = epitope
HQQQPIQQ

SEQ ID NO: 109 - protein, 6 aa, synthetic construct
  REGION 1..6: note = epitope
QQQPIQ

SEQ ID NO: 110 - protein, 6 aa, synthetic construct
  REGION 1..6: note = epitope
  SITE 3: note = misc_feature - Xaa can be any naturally occurring amino acid
QQXPIQ

SEQ ID NO: 111 - skipped

SEQ ID NO: 112 - protein, 15 aa, synthetic construct
  REGION 1..15: note = epitope
  REGION 1..7: note = misc_feature - Xaa can be any naturally occurring amino acid
  REGION 9..10: note = misc_feature - Xaa can be any naturally occurring amino acid
  SITE 15: note = misc_feature - Xaa can be any naturally occurring amino acid
XXXXXXXQXXPIQQX

SEQ ID NO: 113 - protein, 7 aa, synthetic construct
  REGION 1..7: note = epitope
QQQPIQQ

SEQ ID NO: 114 - protein, 6 aa, synthetic construct
  REGION 1..6: note = epitope
QQQPIQ

SEQ ID NO: 115 - protein, 6 aa, synthetic construct
  REGION 1..6: note = epitope
  REGION 2..3: note = misc_feature - Xaa can be any naturally occurring amino acid
QXXPIQ

SEQ ID NO: 116 - protein, 15 aa, synthetic construct
  REGION 1..15: note = epitope
  REGION 1..6: note = misc_feature - Xaa can be any naturally occurring amino acid
  REGION 8..10: note = misc_feature - Xaa can be any naturally occurring amino acid
  SITE 15: note = misc_feature - Xaa can be any naturally occurring amino acid
XXXXXXHXXXPIQQX

SEQ ID NO: 117 - protein, 10 aa, synthetic construct
  REGION 1..10: note = epitope
QQILWYHQQQ

SEQ ID NO: 118 - protein, 7 aa, synthetic construct
  REGION 1..7: note = epitope
QQQPIQQ

SEQ ID NO: 119 - protein, 7 aa, synthetic construct
  REGION 1..7: note = epitope
  REGION 1..3: note = misc_feature - Xaa can be any naturally occurring amino acid
XXXPIQQ

SEQ ID NO: 120 - protein, 5 aa, synthetic construct
  REGION 1..5: note = epitope
QQPIQ

SEQ ID NO: 121 - protein, 10 aa, synthetic construct
  REGION 1..10: note = epitope
YHQQQPIQQQ

SEQ ID NO: 122 - protein, 15 aa, synthetic construct
  REGION 1..15: note = epitope
  REGION 1..7: note = misc_feature - Xaa can be any naturally occurring amino acid
  REGION 9..11: note = misc_feature - Xaa can be any naturally occurring amino acid
  SITE 15: note = misc_feature - Xaa can be any naturally occurring amino acid
XXXXXXXQXXXIQQX

SEQ ID NO: 123 - protein, 5 aa, synthetic construct
  REGION 1..5: note = epitope
QPIQQ

SEQ ID NO: 124 - protein, 4 aa, synthetic construct
  REGION 1..4: note = epitope
QPIQ

SEQ ID NO: 125 - protein, 15 aa, synthetic construct
  REGION 1..15: note = epitope
  REGION 1..2: note = misc_feature - Xaa can be any naturally occurring amino acid
  SITE 7: note = misc_feature - Xaa can be any naturally occurring amino acid
XXILWYXQQQPIQQQ

SEQ ID NO: 126 - protein, 15 aa, synthetic construct
  REGION 1..15: note = epitope
  REGION 1..2: note = misc_feature - Xaa can be any naturally occurring amino acid
  SITE 5: note = misc_feature - Xaa can be any naturally occurring amino acid
  SITE 7: note = misc_feature - Xaa can be any naturally occurring amino acid
XXILXYXQQQPIQQQ

SEQ ID NO: 127 - protein, 15 aa, synthetic construct
  REGION 1..15: note = epitope
  REGION 1..5: note = misc_feature - Xaa can be any naturally occurring amino acid
  SITE 7: note = misc_feature - Xaa can be any naturally occurring amino acid
XXXXXYXQQQPIQQQ

SEQ ID NO: 128 - protein, 7 aa, synthetic construct
  REGION 1..7: note = epitope
YHQQQPI

SEQ ID NO: 129 - protein, 6 aa, synthetic construct
  REGION 1..6: note = epitope
YHQQQP

SEQ ID NO: 130 - protein, 6 aa, synthetic construct
  REGION 1..6: note = epitope
  SITE 2: note = misc_feature - Xaa can be any naturally occurring amino acid
YXQQQP

SEQ ID NO: 131 - protein, 15 aa, synthetic construct
  REGION 1..15: note = epitope
PPFPQQHQQFPQQQI

SEQ ID NO: 132 - protein, 15 aa, synthetic construct
  REGION 1..15: note = epitope
  REGION 1..7: note = misc_feature - Xaa can be any naturally occurring amino acid
  SITE 10: note = misc_feature - Xaa can be any naturally occurring amino acid
XXXXXXXQQXPQQQI

SEQ ID NO: 133 - protein, 8 aa, synthetic construct
  REGION 1..8: note = epitope
QQFPQQQI

SEQ ID NO: 134 - protein, 15 aa, synthetic construct
  REGION 1..15: note = epitope
  REGION 1..10: note = misc_feature - Xaa can be any naturally occurring amino acid
XXXXXXXXXXPQQQI

SEQ ID NO: 135 - protein, 15 aa, synthetic construct
  REGION 1..15: note = epitope
  REGION 1..11: note = misc_feature - Xaa can be any naturally occurring amino acid
XXXXXXXXXXXQQQI

SEQ ID NO: 136 - protein, 15 aa, synthetic construct
  REGION 1..15: note = epitope
  REGION 1..7: note = misc_feature - Xaa can be any naturally occurring amino acid
  REGION 9..10: note = misc_feature - Xaa can be any naturally occurring amino acid
  SITE 15: note = misc_feature - Xaa can be any naturally occurring amino acid
XXXXXXXQXXPQQQX

SEQ ID NO: 137 - protein, 7 aa, synthetic construct
  REGION 1..7: note = epitope
FPQQHQQ

SEQ ID NO: 138 - protein, 4 aa, synthetic construct
  REGION 1..4: note = epitope
AAAA

SEQ ID NO: 139 - protein, 15 aa, synthetic construct
  REGION 1..15: note = epitope
  REGION 1..5: note = misc_feature - Xaa can be any naturally occurring amino acid
  SITE 7: note = misc_feature - Xaa can be any naturally occurring amino acid
XXXXXQXQQFPQQQI

SEQ ID NO: 140 - protein, 15 aa, synthetic construct
  REGION 1..15: note = epitope
  REGION 1..7: note = misc_feature - Xaa can be any naturally occurring amino acid
  REGION 9..11: note = misc_feature - Xaa can be any naturally occurring amino acid
XXXXXXXQXXXQQQI

SEQ ID NO: 141 - protein, 15 aa, synthetic construct
  REGION 1..15: note = epitope
  REGION 1..11: note = misc_feature - Xaa can be any naturally occurring amino acid
XXXXXXXXXXXQQQI

SEQ ID NO: 142 - protein, 6 aa, synthetic construct
  REGION 1..6: note = epitope
FPQQHQ

SEQ ID NO: 143 - protein, 8 aa, synthetic construct
  REGION 1..8: note = epitope
QQFPQQQI

SEQ ID NO: 144 - protein, 8 aa, synthetic construct
  REGION 1..8: note = epitope
  REGION 2..4: note = misc_feature - Xaa can be any naturally occurring amino acid
QXXXQQQI

SEQ ID NO: 145 - protein, 8 aa, synthetic construct
  REGION 1..8: note = epitope
  REGION 1..4: note = misc_feature - Xaa can be any naturally occurring amino acid
XXXXQQQI

SEQ ID NO: 146 - protein, 15 aa, synthetic construct
  REGION 1..15: note = epitope
  REGION 1..7: note = misc_feature - Xaa can be any naturally occurring amino acid
  REGION 9..11: note = misc_feature - Xaa can be any naturally occurring amino acid
XXXXXXXQXXXQQQI

SEQ ID NO: 147 - protein, 10 aa, synthetic construct
  REGION 1..10: note = epitope
PFPQQHQQFP

SEQ ID NO: 148 - protein, 15 aa, synthetic construct
  REGION 1..15: note = epitope
  REGION 1..7: note = misc_feature - Xaa can be any naturally occurring amino acid
  REGION 9..11: note = misc_feature - Xaa can be any naturally occurring amino acid
XXXXXXXQXXXQQQI

SEQ ID NO: 149 - protein, 7 aa, synthetic construct
  REGION 1..7: note = epitope
FPQQHQQ

SEQ ID NO: 150 - protein, 15 aa, synthetic construct
  REGION 1..15: note = epitope
  REGION 1..6: note = misc_feature - Xaa can be any naturally occurring amino acid
  REGION 9..10: note = misc_feature - Xaa can be any naturally occurring amino acid
  SITE 15: note = misc_feature - Xaa can be any naturally occurring amino acid
XXXXXXHQXXPQQQX

SEQ ID NO: 151 - protein, 8 aa, synthetic construct
  REGION 1..8: note = epitope
FPQQHQQF

SEQ ID NO: 152 - protein, 7 aa, synthetic construct
  REGION 1..7: note = epitope
FPQQHQQ

SEQ ID NO: 153 - protein, 15 aa, synthetic construct
  REGION 1..15: note = epitope
  REGION 1..7: note = misc_feature - Xaa can be any naturally occurring amino acid
  REGION 9..10: note = misc_feature - Xaa can be any naturally occurring amino acid
XXXXXXXQXXPQQQI

SEQ ID NO: 154 - protein, 15 aa, synthetic construct
  REGION 1..15: note = epitope
  REGION 1..7: note = misc_feature - Xaa can be any naturally occurring amino acid
  REGION 9..11: note = misc_feature - Xaa can be any naturally occurring amino acid
XXXXXXXQXXXQQQI

SEQ ID NO: 155 - protein, 15 aa, synthetic construct
  REGION 1..15: note = epitope
  REGION 1..11: note = misc_feature - Xaa can be any naturally occurring amino acid
XXXXXXXXXXXQQQI

SEQ ID NO: 156 - protein, 10 aa, synthetic construct
  REGION 1..10: note = epitope
PPFPQQHQQF

SEQ ID NO: 157 - protein, 8 aa, synthetic construct
  REGION 1..8: note = epitope
FPQQHQQF

SEQ ID NO: 158 - protein, 8 aa, synthetic construct
  REGION 1..8: note = epitope
QQFPQQQI

SEQ ID NO: 159 - protein, 5 aa, synthetic construct
  REGION 1..5: note = epitope
FPQQQ

SEQ ID NO: 160 - protein, 6 aa, synthetic construct
  REGION 1..6: note = epitope
  REGION 1..2: note = misc_feature - Xaa can be any naturally occurring amino acid
XXQQQI

SEQ ID NO: 161 - protein, 15 aa, synthetic construct
  REGION 1..15: note = epitope
  REGION 1..7: note = misc_feature - Xaa can be any naturally occurring amino acid
  REGION 9..10: note = misc_feature - Xaa can be any naturally occurring amino acid
XXXXXXXQXXPQQQI

SEQ ID NO: 162 - protein, 15 aa, synthetic construct
  REGION 1..15: note = epitope
  REGION 1..7: note = misc_feature - Xaa can be any naturally occurring amino acid
  REGION 9..11: note = misc_feature - Xaa can be any naturally occurring amino acid
XXXXXXXQXXXQQQI

SEQ ID NO: 163 - protein, 15 aa, synthetic construct
  REGION 1..15: note = epitope
  REGION 1..7: note = misc_feature - Xaa can be any naturally occurring amino acid
  REGION 9..10: note = misc_feature - Xaa can be any naturally occurring amino acid
XXXXXXXQXXPQQQI

SEQ ID NO: 164 - protein, 7 aa, synthetic construct
  REGION 1..7: note = epitope
FPQQHQQ

SEQ ID NO: 165 - protein, 15 aa, synthetic construct
  REGION 1..15: note = epitope
  REGION 1..10: note = misc_feature - Xaa can be any naturally occurring amino acid
XXXXXXXXXXPQQQI

SEQ ID NO: 166 - protein, 7 aa, synthetic construct
  REGION 1..7: note = epitope
FPQQHQQ

SEQ ID NO: 167 - protein, 15 aa, synthetic construct
  REGION 1..15: note = epitope
  REGION 1..6: note = misc_feature - Xaa can be any naturally occurring amino acid
  REGION 9..10: note = misc_feature - Xaa can be any naturally occurring amino acid
XXXXXXHQXXPQQQI

SEQ ID NO: 168 - protein, 15 aa, synthetic construct
  REGION 1..15: note = epitope
  REGION 1..7: note = misc_feature - Xaa can be any naturally occurring amino acid
  REGION 9..10: note = misc_feature - Xaa can be any naturally occurring amino acid
XXXXXXXQXXPQQQI

SEQ ID NO: 169 - protein, 8 aa, synthetic construct
  REGION 1..8: note = epitope
FPQQHQQF

SEQ ID NO: 170 - protein, 15 aa, synthetic construct
  REGION 1..15: note = epitope
  REGION 1..7: note = misc_feature - Xaa can be any naturally occurring amino acid
  REGION 9..11: note = misc_feature - Xaa can be any naturally occurring amino acid
XXXXXXXQXXXQQQI

SEQ ID NO: 171 - protein, 8 aa, synthetic construct
  REGION 1..8: note = epitope
PPFPQQHQ

SEQ ID NO: 172 - protein, 8 aa, synthetic construct
  REGION 1..8: note = epitope
QQFPQQQI

SEQ ID NO: 173 - protein, 8 aa, synthetic construct
  REGION 1..8: note = epitope
  REGION 2..4: note = misc_feature - Xaa can be any naturally occurring amino acid
QXXXQQQI

SEQ ID NO: 174 - protein, 15 aa, synthetic construct
  REGION 1..15: note = epitope
  REGION 1..7: note = misc_feature - Xaa can be any naturally occurring amino acid
  REGION 9..11: note = misc_feature - Xaa can be any naturally occurring amino acid
XXXXXXXQXXXQQQI

SEQ ID NO: 175 - protein, 15 aa, synthetic construct
  REGION 1..15: note = epitope
  REGION 1..4: note = misc_feature - Xaa can be any naturally occurring amino acid
  SITE 10: note = misc_feature - Xaa can be any naturally occurring amino acid
  SITE 15: note = misc_feature - Xaa can be any naturally occurring amino acid
XXXXQQHQQXPQQQX

SEQ ID NO: 176 - protein, 15 aa, synthetic construct
  REGION 1..15: note = epitope
  REGION 1..7: note = misc_feature - Xaa can be any naturally occurring amino acid
  REGION 9..10: note = misc_feature - Xaa can be any naturally occurring amino acid
  SITE 15: note = misc_feature - Xaa can be any naturally occurring amino acid
XXXXXXXQXXPQQQX

SEQ ID NO: 177 - protein, 9 aa, synthetic construct
  REGION 1..9: note = epitope
PPFPQQHQQ

SEQ ID NO: 178 - protein, 9 aa, synthetic construct
  REGION 1..9: note = epitope
  REGION 1..4: note = misc_feature - Xaa can be any naturally occurring amino acid
XXXXQQHQQ

SEQ ID NO: 179 - protein, 15 aa, synthetic construct
  REGION 1..15: note = epitope
  REGION 1..7: note = misc_feature - Xaa can be any naturally occurring amino acid
  REGION 9..10: note = misc_feature - Xaa can be any naturally occurring amino acid
  SITE 15: note = misc_feature - Xaa can be any naturally occurring amino acid
XXXXXXXQXXPQQQX

SEQ ID NO: 180 - protein, 9 aa, synthetic construct
  REGION 1..9: note = epitope
FPQQHQQFP

SEQ ID NO: 181 - protein, 8 aa, synthetic construct
  REGION 1..8: note = epitope
FPQQHQQF

SEQ ID NO: 182 - protein, 8 aa, synthetic construct
  REGION 1..8: note = epitope
QQFPQQQI

SEQ ID NO: 183 - protein, 15 aa, synthetic construct
  REGION 1..15: note = epitope
  SITE 1: note = misc_feature - Xaa can be any naturally occurring amino acid
  REGION 3..4: note = misc_feature - Xaa can be any naturally occurring amino acid
  SITE 10: note = misc_feature - Xaa can be any naturally occurring amino acid
XPXXQQHQQXPQQQI

SEQ ID NO: 184 - protein, 15 aa, synthetic construct
  REGION 1..15: note = epitope
  REGION 1..4: note = misc_feature - Xaa can be any naturally occurring amino acid
  REGION 9..10: note = misc_feature - Xaa can be any naturally occurring amino acid
XXXXQQHQXXPQQQI

SEQ ID NO: 185 - protein, 9 aa, synthetic construct
  REGION 1..9: note = epitope
PPFPQQHQQ

SEQ ID NO: 186 - protein, 9 aa, synthetic construct
  REGION 1..9: note = epitope
  SITE 1: note = misc_feature - Xaa can be any naturally occurring amino acid
  REGION 3..4: note = misc_feature - Xaa can be any naturally occurring amino acid
XPXXQQHQQ

SEQ ID NO: 187 - protein, 9 aa, synthetic construct
  REGION 1..9: note = epitope
  REGION 1..4: note = misc_feature - Xaa can be any naturally occurring amino acid
  SITE 9: note = misc_feature - Xaa can be any naturally occurring amino acid
XXXXQQHQX

SEQ ID NO: 188 - protein, 10 aa, synthetic construct
  REGION 1..10: note = epitope
QHQQFPQQQI

SEQ ID NO: 189 - protein, 10 aa, synthetic construct
  REGION 1..10: note = epitope
  SITE 5: note = misc_feature - Xaa can be any naturally occurring amino acid
QHQQXPQQQI

SEQ ID NO: 190 - protein, 10 aa, synthetic construct
  REGION 1..10: note = epitope
  REGION 1..2: note = misc_feature - Xaa can be any naturally occurring amino acid
  REGION 4..6: note = misc_feature - Xaa can be any naturally occurring amino acid
XXQXXXQQQI

SEQ ID NO: 191 - protein, 15 aa, synthetic construct
  REGION 1..15: note = epitope
SQQQQPFPQQQQPLL

SEQ ID NO: 192 - protein, 15 aa, synthetic construct
  REGION 1..15: note = epitope
  REGION 1..2: note = misc_feature - Xaa can be any naturally occurring amino acid
  SITE 6: note = misc_feature - Xaa can be any naturally occurring amino acid
  SITE 12: note = misc_feature - Xaa can be any naturally occurring amino acid
  REGION 14..15: note = misc_feature - Xaa can be any naturally occurring amino acid
XXQQQXFPQQQXPXX

SEQ ID NO: 193 - protein, 15 aa, synthetic construct
  REGION 1..15: note = epitope
  REGION 1..3: note = misc_feature - Xaa can be any naturally occurring amino acid
  SITE 6: note = misc_feature - Xaa can be any naturally occurring amino acid
  REGION 12..15: note = misc_feature - Xaa can be any naturally occurring amino acid
XXXQQXFPQQQXXXX

SEQ ID NO: 194 - protein, 10 aa, synthetic construct
  REGION 1..10: note = epitope
QQQQPFPQQQ

SEQ ID NO: 195 - protein, 8 aa, synthetic construct
  REGION 1..8: note = epitope
QQPFPQQQ

SEQ ID NO: 196 - protein, 6 aa, synthetic construct
  REGION 1..6: note = epitope
QPFPQQ

SEQ ID NO: 197 - protein, 6 aa, synthetic construct
  REGION 1..6: note = epitope
  SITE 2: note = misc_feature - Xaa can be any naturally occurring amino acid
QXFPQQ

SEQ ID NO: 198 - protein, 6 aa, synthetic construct
  REGION 1..6: note = epitope
  REGION 2..3: note = misc_feature - Xaa can be any naturally occurring amino acid
QXXPQQ

SEQ ID NO: 199 - protein, 15 aa, synthetic construct
  REGION 1..15: note = epitope
  SITE 1: note = misc_feature - Xaa can be any naturally occurring amino acid
  REGION 14..15: note = misc_feature - Xaa can be any naturally occurring amino acid
XQQQQPFPQQQQPXX

SEQ ID NO: 200 - protein, 10 aa, synthetic construct
  REGION 1..10: note = epitope
QQQQPFPQQQ

SEQ ID NO: 201 - protein, 10 aa, synthetic construct
  REGION 1..10: note = epitope
  REGION 1..2: note = misc_feature - Xaa can be any naturally occurring amino acid
  SITE 5: note = misc_feature - Xaa can be any naturally occurring amino acid
  SITE 7: note = misc_feature - Xaa can be any naturally occurring amino acid
XXQQXFXQQQ

SEQ ID NO: 202 - protein, 15 aa, synthetic construct
  REGION 1..15: note = epitope
  REGION 1..3: note = misc_feature - Xaa can be any naturally occurring amino acid
  SITE 6: note = misc_feature - Xaa can be any naturally occurring amino acid
  REGION 12..15: note = misc_feature - Xaa can be any naturally occurring amino acid
XXXQQXFPQQQXXXX

SEQ ID NO: 203 - protein, 15 aa, synthetic construct
  REGION 1..15: note = epitope
  REGION 1..3: note = misc_feature - Xaa can be any naturally occurring amino acid
  REGION 6..7: note = misc_feature - Xaa can be any naturally occurring amino acid
  REGION 11..15: note = misc_feature - Xaa can be any naturally occurring amino acid
XXXQQXXPQQXXXXX

SEQ ID NO: 204 - protein, 7 aa, synthetic construct
  REGION 1..7: note = epitope
QQPFPQQ

SEQ ID NO: 205 - protein, 6 aa, synthetic construct
  REGION 1..6: note = epitope
QPFPQQ

SEQ ID NO: 206 - protein, 6 aa, synthetic construct
  REGION 1..6: note = epitope
  SITE 2: note = misc_feature - Xaa can be any naturally occurring amino acid
QXFPQQ

SEQ ID NO: 207 - protein, 6 aa, synthetic construct
  REGION 1..6: note = epitope
  REGION 2..3: note = misc_feature - Xaa can be any naturally occurring amino acid
QXXPQQ

SEQ ID NO: 208 - protein, 15 aa, synthetic construct
  REGION 1..15: note = epitope
  SITE 1: note = misc_feature - Xaa can be any naturally occurring amino acid
  REGION 6..7: note = misc_feature - Xaa can be any naturally occurring amino acid
  REGION 12..14: note = misc_feature - Xaa can be any naturally occurring amino acid
XQQQQXXPQQQXXXL

SEQ ID NO: 209 - protein, 10 aa, synthetic construct
  REGION 1..10: note = epitope
QQQQPFPQQQ

SEQ ID NO: 210 - protein, 10 aa, synthetic construct
  REGION 1..10: note = epitope
  REGION 5..6: note = misc_feature - Xaa can be any naturally occurring amino acid
QQQQXXPQQQ

SEQ ID NO: 211 - protein, 10 aa, synthetic construct
  REGION 1..10: note = epitope
QPFPQQQQPL

SEQ ID NO: 212 - protein, 9 aa, synthetic construct
  REGION 1..9: note = epitope
QPFPQQQQP

SEQ ID NO: 213 - protein, 9 aa, synthetic construct
  REGION 1..9: note = epitope
  REGION 2..3: note = misc_feature - Xaa can be any naturally occurring amino acid
  REGION 8..9: note = misc_feature - Xaa can be any naturally occurring amino acid
QXXPQQQXX

SEQ ID NO: 214 - protein, 15 aa, synthetic construct
  REGION 1..15: note = epitope
  SITE 1: note = misc_feature - Xaa can be any naturally occurring amino acid
  SITE 6: note = misc_feature - Xaa can be any naturally occurring amino acid
  REGION 12..15: note = misc_feature - Xaa can be any naturally occurring amino acid
XQQQQXFPQQQXXXX

SEQ ID NO: 215 - protein, 15 aa, synthetic construct
  REGION 1..15: note = epitope
  REGION 1..2: note = misc_feature - Xaa can be any naturally occurring amino acid
  SITE 6: note = misc_feature - Xaa can be any naturally occurring amino acid
  REGION 11..15: note = misc_feature - Xaa can be any naturally occurring amino acid
XXQQQXFPQQXXXXX

SEQ ID NO: 216 - protein, 15 aa, synthetic construct
  REGION 1..15: note = epitope
  REGION 1..3: note = misc_feature - Xaa can be any naturally occurring amino acid
  SITE 6: note = misc_feature - Xaa can be any naturally occurring amino acid
  SITE 8: note = misc_feature - Xaa can be any naturally occurring amino acid
  REGION 11..15: note = misc_feature - Xaa can be any naturally occurring amino acid
XXXQQXFXQQXXXXX

SEQ ID NO: 217 - protein, 8 aa, synthetic construct
  REGION 1..8: note = epitope
QQPFPQQQ

SEQ ID NO: 218 - protein, 7 aa, synthetic construct
  REGION 1..7: note = epitope
QQPFPQQ

SEQ ID NO: 219 - protein, 6 aa, synthetic construct
  REGION 1..6: note = epitope
QPFPQQ

SEQ ID NO: 220 - protein, 15 aa, synthetic construct
  REGION 1..15: note = epitope
  REGION 1..3: note = misc_feature - Xaa can be any naturally occurring amino acid
  REGION 6..7: note = misc_feature - Xaa can be any naturally occurring amino acid
  REGION 12..15: note = misc_feature - Xaa can be any naturally occurring amino acid
XXXQQXXPQQQXXXX

SEQ ID NO: 221 - protein, 8 aa, synthetic construct
  REGION 1..8: note = epitope
QQPFPQQQ

SEQ ID NO: 222 - protein, 4 aa, synthetic construct
  REGION 1..4: note = epitope
QQPF

SEQ ID NO: 223 - protein, 10 aa, synthetic construct
  REGION 1..10: note = epitope
QQQQPFPQQQ

SEQ ID NO: 224 - protein, 7 aa, synthetic construct
  REGION 1..7: note = epitope
QPFPQQQ

SEQ ID NO: 225 - protein, 10 aa, synthetic construct
  REGION 1..10: note = epitope
QQPFPQQQQP

SEQ ID NO: 226 - protein, 10 aa, synthetic construct
  REGION 1..10: note = epitope
  SITE 1: note = misc_feature - Xaa can be any naturally occurring amino acid
  REGION 3..4: note = misc_feature - Xaa can be any naturally occurring amino acid
  SITE 9: note = misc_feature - Xaa can be any naturally occurring amino acid
XQXXPQQQXP

SEQ ID NO: 227 - protein, 4 aa, synthetic construct
  REGION 1..4: note = epitope
AAAA

SEQ ID NO: 228 - protein, 7 aa, synthetic construct
  REGION 1..7: note = epitope
QPFPQQQ

SEQ ID NO: 229 - protein, 4 aa, synthetic construct
  REGION 1..4: note = epitope
QPFP

SEQ ID NO: 230 - protein, 15 aa, synthetic construct
  REGION 1..15: note = epitope
  REGION 1..3: note = misc_feature - Xaa can be any naturally occurring amino acid
  SITE 7: note = misc_feature - Xaa can be any naturally occurring amino acid
XXXQQPXPQQQQPLL

SEQ ID NO: 231 - protein, 10 aa, synthetic construct
  REGION 1..10: note = epitope
QQPFPQQQQP

SEQ ID NO: 232 - protein, 7 aa, synthetic construct
  REGION 1..7: note = epitope
QPFPQQQ

SEQ ID NO: 233 - protein, 7 aa, synthetic construct
  REGION 1..7: note = epitope
  SITE 3: note = misc_feature - Xaa can be any naturally occurring amino acid
QPXPQQQ

SEQ ID NO: 234 - protein, 15 aa, synthetic construct
  REGION 1..15: note = epitope
  SITE 2: note = misc_feature - Xaa can be any naturally occurring amino acid
  SITE 4: note = misc_feature - Xaa can be any naturally occurring amino acid
  SITE 7: note = misc_feature - Xaa can be any naturally occurring amino acid
  SITE 10: note = misc_feature - Xaa can be any naturally occurring amino acid
  SITE 12: note = misc_feature - Xaa can be any naturally occurring amino acid
SXQXQPXPQXQXPLL

SEQ ID NO: 235 - protein, 15 aa, synthetic construct
  REGION 1..15: note = epitope
  REGION 1..5: note = misc_feature - Xaa can be any naturally occurring amino acid
  SITE 7: note = misc_feature - Xaa can be any naturally occurring amino acid
  SITE 10: note = misc_feature - Xaa can be any naturally occurring amino acid
  SITE 12: note = misc_feature - Xaa can be any naturally occurring amino acid
  REGION 14..15: note = misc_feature - Xaa can be any naturally occurring amino acid
XXXXXPXPQXQXPXX

SEQ ID NO: 236 - protein, 9 aa, synthetic construct
  REGION 1..9: note = epitope
QPFPQQQQP

SEQ ID NO: 237 - protein, 7 aa, synthetic construct
  REGION 1..7: note = epitope
QPFPQQQ

SEQ ID NO: 238 - protein, 4 aa, synthetic construct
  REGION 1..4: note = epitope
PFPQ

SEQ ID NO: 239 - protein, 15 aa, synthetic construct
  REGION 1..15: note = epitope
  SITE 1: note = misc_feature - Xaa can be any naturally occurring amino acid
  SITE 4: note = misc_feature - Xaa can be any naturally occurring amino acid
  REGION 6..7: note = misc_feature - Xaa can be any naturally occurring amino acid
  REGION 14..15: note = misc_feature - Xaa can be any naturally occurring amino acid
XQQXQXXPQQQQPXX

SEQ ID NO: 240 - protein, 15 aa, synthetic construct
  REGION 1..15: note = epitope
  REGION 1..7: note = misc_feature - Xaa can be any naturally occurring amino acid
  REGION 13..15: note = misc_feature - Xaa can be any naturally occurring amino acid
XXXXXXXPQQQQXXX

SEQ ID NO: 241 - protein, 10 aa, synthetic construct
  REGION 1..10: note = epitope
QQQQPFPQQQ

SEQ ID NO: 242 - protein, 8 aa, synthetic construct
  REGION 1..8: note = epitope
QQPFPQQQ

SEQ ID NO: 243 - protein, 5 aa, synthetic construct
  REGION 1..5: note = epitope
QQPFP

SEQ ID NO: 244 - protein, 9 aa, synthetic construct
  REGION 1..9: note = epitope
QQQPLLLQQ

SEQ ID NO: 245 - protein, 9 aa, synthetic construct
  REGION 1..9: note = epitope
  REGION 4..6: note = misc_feature - Xaa can be any naturally occurring amino acid
QQQXXXLQQ

SEQ ID NO: 246 - protein, 7 aa, synthetic construct
  REGION 1..7: note = epitope
QQPFPQQ

SEQ ID NO: 247 - protein, 7 aa, synthetic construct
  REGION 1..7: note = epitope
QPFPQQQ

SEQ ID NO: 248 - protein, 6 aa, synthetic construct
  REGION 1..6: note = epitope
QPFPQQ

SEQ ID NO: 249 - protein, 15 aa, synthetic construct
  REGION 1..15: note = epitope
  SITE 1: note = misc_feature - Xaa can be any naturally occurring amino acid
  SITE 6: note = misc_feature - Xaa can be any naturally occurring amino acid
  REGION 11..15: note = misc_feature - Xaa can be any naturally occurring amino acid
XQQQQXFPQQXXXXX

SEQ ID NO: 250 - protein, 15 aa, synthetic construct
  REGION 1..15: note = epitope
  REGION 1..2: note = misc_feature - Xaa can be any naturally occurring amino acid
  REGION 5..6: note = misc_feature - Xaa can be any naturally occurring amino acid
  REGION 11..15: note = misc_feature - Xaa can be any naturally occurring amino acid
XXQQXXFPQQXXXXX

SEQ ID NO: 251 - protein, 7 aa, synthetic construct
  REGION 1..7: note = epitope
QQPFPQQ

SEQ ID NO: 252 - protein, 7 aa, synthetic construct
  REGION 1..7: note = epitope
  SITE 3: note = misc_feature - Xaa can be any naturally occurring amino acid
QQXFPQQ

SEQ ID NO: 253 - protein, 7 aa, synthetic construct
  REGION 1..7: note = epitope
  REGION 2..3: note = misc_feature - Xaa can be any naturally occurring amino acid
QXXFPQQ

SEQ ID NO: 254 - protein, 15 aa, synthetic construct
  REGION 1..15: note = epitope
  SITE 4: note = misc_feature - Xaa can be any naturally occurring amino acid
  SITE 7: note = misc_feature - Xaa can be any naturally occurring amino acid
  REGION 14..15: note = misc_feature - Xaa can be any naturally occurring amino acid
SQQXQPXPQQQQPXX

SEQ ID NO: 255 - protein, 8 aa, synthetic construct
  REGION 1..8: note = epitope
QQPFPQQQ

SEQ ID NO: 256 - protein, 7 aa, synthetic construct
  REGION 1..7: note = epitope
QPFPQQQ

SEQ ID NO: 257 - protein, 7 aa, synthetic construct
  REGION 1..7: note = epitope
  SITE 3: note = misc_feature - Xaa can be any naturally occurring amino acid
QPXPQQQ

SEQ ID NO: 258 - protein, 4 aa, synthetic construct
  REGION 1..4: note = epitope
FPQQ

SEQ ID NO: 259 - protein, 4 aa, synthetic construct
  REGION 1..4: note = epitope
AAAA

SEQ ID NO: 260 - protein, 15 aa, synthetic construct
  REGION 1..15: note = epitope
  SITE 1: note = misc_feature - Xaa can be any naturally occurring amino acid
  REGION 6..7: note = misc_feature - Xaa can be any naturally occurring amino acid
XQQQQXXPQQQQPLL

SEQ ID NO: 261 - protein, 15 aa, synthetic construct
  REGION 1..15: note = epitope
  REGION 1..4: note = misc_feature - Xaa can be any naturally occurring amino acid
  REGION 6..7: note = misc_feature - Xaa can be any naturally occurring amino acid
XXXXQXXPQQQQPLL

SEQ ID NO: 262 - protein, 9 aa, synthetic construct
  REGION 1..9: note = epitope
QPFPQQQQP

SEQ ID NO: 263 - protein, 7 aa, synthetic construct
  REGION 1..7: note = epitope
QPFPQQQ

SEQ ID NO: 264 - protein, 15 aa, synthetic construct
  REGION 1..15: note = epitope
  REGION 1..4: note = misc_feature - Xaa can be any naturally occurring amino acid
  SITE 6: note = misc_feature - Xaa can be any naturally occurring amino acid
XXXXQXFPQQQQPLL

SEQ ID NO: 265 - protein, 15 aa, synthetic construct
  REGION 1..15: note = epitope
  REGION 1..7: note = misc_feature - Xaa can be any naturally occurring amino acid
XXXXXXXPQQQQPLL

SEQ ID NO: 266 - protein, 15 aa, synthetic construct
  REGION 1..15: note = epitope
  REGION 1..9: note = misc_feature - Xaa can be any naturally occurring amino acid
  REGION 14..15: note = misc_feature - Xaa can be any naturally occurring amino acid
XXXXXXXXXQQQPXX

SEQ ID NO: 267 - protein, 8 aa, synthetic construct
  REGION 1..8: note = epitope
QQPFPQQQ

SEQ ID NO: 268 - protein, 15 aa, synthetic construct
  REGION 1..15: note = epitope
  REGION 1..2: note = misc_feature - Xaa can be any naturally occurring amino acid
  SITE 6: note = misc_feature - Xaa can be any naturally occurring amino acid
  REGION 12..15: note = misc_feature - Xaa can be any naturally occurring amino acid
XXQQQXFPQQQXXXX

SEQ ID NO: 269 - protein, 4 aa, synthetic construct
  REGION 1..4: note = epitope
AAAA

SEQ ID NO: 270 - protein, 8 aa, synthetic construct
  REGION 1..8: note = epitope
QQPFPQQQ

SEQ ID NO: 271 - protein, 7 aa, synthetic construct
  REGION 1..7: note = epitope
QPFPQQQ

SEQ ID NO: 272 - protein, 4 aa, synthetic construct
  REGION 1..4: note = epitope
QPFP

SEQ ID NO: 273 - protein, 4 aa, synthetic construct
  REGION 1..4: note = epitope
AAAA

SEQ ID NO: 274 - protein, 7 aa, synthetic construct
  REGION 1..7: note = epitope
QPFPQQQ

SEQ ID NO: 275 - protein, 15 aa, synthetic construct
  REGION 1..15: note = epitope
  REGION 1..6: note = misc_feature - Xaa can be any naturally occurring amino acid
  SITE 14: note = misc_feature - Xaa can be any naturally occurring amino acid
XXXXXXFPQQQQPXL

SEQ ID NO: 276 - protein, 15 aa, synthetic construct
  REGION 1..15: note = epitope
  REGION 1..7: note = misc_feature - Xaa can be any naturally occurring amino acid
  REGION 10..11: note = misc_feature - Xaa can be any naturally occurring amino acid
  SITE 14: note = misc_feature - Xaa can be any naturally occurring amino acid
XXXXXXXPQXXQPXL

SEQ ID NO: 277 - protein, 8 aa, synthetic construct
  REGION 1..8: note = epitope
QQPFPQQQ

SEQ ID NO: 278 - protein, 7 aa, synthetic construct
  REGION 1..7: note = epitope
QPFPQQQ

SEQ ID NO: 279 - protein, 7 aa, synthetic construct
  REGION 1..7: note = epitope
QQPFPQQ

SEQ ID NO: 280 - protein, 15 aa, synthetic construct
  REGION 1..15: note = epitope
  SITE 1: note = misc_feature - Xaa can be any naturally occurring amino acid
  REGION 3..4: note = misc_feature - Xaa can be any naturally occurring amino acid
  SITE 9: note = misc_feature - Xaa can be any naturally occurring amino acid
  REGION 11..15: note = misc_feature - Xaa can be any naturally occurring amino acid
XQXXQPFPXQXXXXX

SEQ ID NO: 281 - protein, 15 aa, synthetic construct
  REGION 1..15: note = epitope
QQPQQPFPQQQQPLI

SEQ ID NO: 282 - protein, 15 aa, synthetic construct
  REGION 1..15: note = epitope
  REGION 6..7: note = misc_feature - Xaa can be any naturally occurring amino acid
  REGION 11..15: note = misc_feature - Xaa can be any naturally occurring amino acid
QQPQQXXPQQXXXXX

SEQ ID NO: 283 - protein, 15 aa, synthetic construct
  REGION 1..15: note = epitope
  SITE 2: note = misc_feature - Xaa can be any naturally occurring amino acid
  REGION 6..7: note = misc_feature - Xaa can be any naturally occurring amino acid
  REGION 11..15: note = misc_feature - Xaa can be any naturally occurring amino acid
QXPQQXXPQQXXXXX

SEQ ID NO: 284 - protein, 15 aa, synthetic construct
  REGION 1..15: note = epitope
  REGION 2..3: note = misc_feature - Xaa can be any naturally occurring amino acid
  REGION 6..7: note = misc_feature - Xaa can be any naturally occurring amino acid
  REGION 11..15: note = misc_feature - Xaa can be any naturally occurring amino acid
QXXQQXXPQQXXXXX

SEQ ID NO: 285 - protein, 9 aa, synthetic construct
  REGION 1..9: note = epitope
QPFPQQQQP

SEQ ID NO: 286 - protein, 8 aa, synthetic construct
  REGION 1..8: note = epitope
QPFPQQQQ

SEQ ID NO: 287 - protein, 7 aa, synthetic construct
  REGION 1..7: note = epitope
QPFPQQQ

SEQ ID NO: 288 - protein, 7 aa, synthetic construct
  REGION 1..7: note = epitope
  REGION 2..3: note = misc_feature - Xaa can be any naturally occurring amino acid
  SITE 7: note = misc_feature - Xaa can be any naturally occurring amino acid
QXXPQQX

SEQ ID NO: 289 - protein, 15 aa, synthetic construct
  REGION 1..15: note = epitope
  REGION 1..2: note = misc_feature - Xaa can be any naturally occurring amino acid
  SITE 6: note = misc_feature - Xaa can be any naturally occurring amino acid
  REGION 11..15: note = misc_feature - Xaa can be any naturally occurring amino acid
XXPQQXFPQQXXXXX

SEQ ID NO: 290 - protein, 8 aa, synthetic construct
  REGION 1..8: note = epitope
QQPFPQQQ

SEQ ID NO: 291 - protein, 6 aa, synthetic construct
  REGION 1..6: note = epitope
QPFPQQ

SEQ ID NO: 292 - protein, 6 aa, synthetic construct
  REGION 1..6: note = epitope
  SITE 2: note = misc_feature - Xaa can be any naturally occurring amino acid
QXFPQQ

SEQ ID NO: 293 - protein, 8 aa, synthetic construct
  REGION 1..8: note = epitope
QPQQPQQP

SEQ ID NO: 294 - protein, 5 aa, synthetic construct
  REGION 1..5: note = epitope
QPQQP

SEQ ID NO: 295 - protein, 10 aa, synthetic construct
  REGION 1..10: note = epitope
QPFPQQQQPL

SEQ ID NO: 296 - protein, 9 aa, synthetic construct
  REGION 1..9: note = epitope
QPFPQQQQP

SEQ ID NO: 297 - protein, 7 aa, synthetic construct
  REGION 1..7: note = epitope
QPFPQQQ

SEQ ID NO: 298 - protein, 15 aa, synthetic construct
  REGION 1..15: note = epitope
  REGION 1..3: note = misc_feature - Xaa can be any naturally occurring amino acid
  REGION 6..7: note = misc_feature - Xaa can be any naturally occurring amino acid
  REGION 12..15: note = misc_feature - Xaa can be any naturally occurring amino acid
XXXQQXXPQQQXXXX

SEQ ID NO: 299 - protein, 7 aa, synthetic construct
  REGION 1..7: note = epitope
QPFPQQQ

SEQ ID NO: 300 - protein, 15 aa, synthetic construct
  REGION 1..15: note = epitope
  REGION 1..2: note = misc_feature - Xaa can be any naturally occurring amino acid
  REGION 6..7: note = misc_feature - Xaa can be any naturally occurring amino acid
  REGION 12..15: note = misc_feature - Xaa can be any naturally occurring amino acid
XXPQQXXPQQQXXXX

SEQ ID NO: 301 - protein, 8 aa, synthetic construct
  REGION 1..8: note = epitope
QPFPQQQQ

SEQ ID NO: 302 - protein, 6 aa, synthetic construct
  REGION 1..6: note = epitope
PFPQQQ

SEQ ID NO: 303 - protein, 7 aa, synthetic construct
  REGION 1..7: note = epitope
  REGION 1..2: note = misc_feature - Xaa can be any naturally occurring amino acid
  SITE 7: note = misc_feature - Xaa can be any naturally occurring amino acid
XXPQQQX

SEQ ID NO: 304 - protein, 15 aa, synthetic construct
  REGION 1..15: note = epitope
  SITE 1: note = misc_feature - Xaa can be any naturally occurring amino acid
  REGION 6..7: note = misc_feature - Xaa can be any naturally occurring amino acid
  REGION 11..13: note = misc_feature - Xaa can be any naturally occurring amino acid
XQPQQXXPQQXXXLI

SEQ ID NO: 305 - protein, 15 aa, synthetic construct
  REGION 1..15: note = epitope
  SITE 1: note = misc_feature - Xaa can be any naturally occurring amino acid
  REGION 6..7: note = misc_feature - Xaa can be any naturally occurring amino acid
  REGION 11..15: note = misc_feature - Xaa can be any naturally occurring amino acid
XQPQQXXPQQXXXXX

SEQ ID NO: 306 - protein, 8 aa, synthetic construct
  REGION 1..8: note = epitope
QPFPQQQQ

SEQ ID NO: 307 - protein, 7 aa, synthetic construct
  REGION 1..7: note = epitope
QQPFPQQ

SEQ ID NO: 308 - protein, 6 aa, synthetic construct
  REGION 1..6: note = epitope
QPFPQQ

SEQ ID NO: 309 - protein, 15 aa, synthetic construct
  REGION 1..15: note = epitope
  SITE 1: note = misc_feature - Xaa can be any naturally occurring amino acid
  REGION 6..7: note = misc_feature - Xaa can be any naturally occurring amino acid
  SITE 9: note = misc_feature - Xaa can be any naturally occurring amino acid
  SITE 12: note = misc_feature - Xaa can be any naturally occurring amino acid
  REGION 14..15: note = misc_feature - Xaa can be any naturally occurring amino acid
XQPQQXXPXQQXPXX

SEQ ID NO: 310 - protein, 9 aa, synthetic construct
  REGION 1..9: note = epitope
QPFPQQQQP

SEQ ID NO: 311 - protein, 7 aa, synthetic construct
  REGION 1..7: note = epitope
QPFPQQQ

SEQ ID NO: 312 - protein, 15 aa, synthetic construct
  REGION 1..15: note = epitope
  REGION 1..2: note = misc_feature - Xaa can be any naturally occurring amino acid
  REGION 6..8: note = misc_feature - Xaa can be any naturally occurring amino acid
  REGION 11..15: note = misc_feature - Xaa can be any naturally occurring amino acid
XXPQQXXXQQXXXXX

SEQ ID NO: 313 - protein, 10 aa, synthetic construct
  REGION 1..10: note = epitope
QQPQQPFPQQ

SEQ ID NO: 314 - protein, 9 aa, synthetic construct
  REGION 1..9: note = epitope
QQPFPQQQQ

SEQ ID NO: 315 - protein, 6 aa, synthetic construct
  REGION 1..6: note = epitope
QPFPQQ

SEQ ID NO: 316 - protein, 15 aa, synthetic construct
  REGION 1..15: note = epitope
  REGION 1..2: note = misc_feature - Xaa can be any naturally occurring amino acid
  REGION 6..9: note = misc_feature - Xaa can be any naturally occurring amino acid
  REGION 11..15: note = misc_feature - Xaa can be any naturally occurring amino acid
XXPQQXXXXQXXXXX

SEQ ID NO: 317 - protein, 7 aa, synthetic construct
  REGION 1..7: note = epitope
QPFPQQQ

SEQ ID NO: 318 - protein, 6 aa, synthetic construct
  REGION 1..6: note = epitope
QPFPQQ

SEQ ID NO: 319 - protein, 15 aa, synthetic construct
  REGION 1..15: note = epitope
  REGION 14..15: note = misc_feature - Xaa can be any naturally occurring amino acid
QQPQQPFPQQQQPXX

SEQ ID NO: 320 - protein, 8 aa, synthetic construct
  REGION 1..8: note = epitope
QPFPQQQQ

SEQ ID NO: 321 - protein, 7 aa, synthetic construct
  REGION 1..7: note = epitope
QPFPQQQ

SEQ ID NO: 322 - protein, 15 aa, synthetic construct
  REGION 1..15: note = epitope
  REGION 1..2: note = misc_feature - Xaa can be any naturally occurring amino acid
  REGION 6..7: note = misc_feature - Xaa can be any naturally occurring amino acid
  REGION 12..15: note = misc_feature - Xaa can be any naturally occurring amino acid
XXPQQXXPQQQXXXX

SEQ ID NO: 323 - protein, 8 aa, synthetic construct
  REGION 1..8: note = epitope
QPFPQQQQ

SEQ ID NO: 324 - protein, 15 aa, synthetic construct
  REGION 1..15: note = epitope
  REGION 1..4: note = misc_feature - Xaa can be any naturally occurring amino acid
  REGION 6..7: note = misc_feature - Xaa can be any naturally occurring amino acid
  REGION 12..15: note = misc_feature - Xaa can be any naturally occurring amino acid
XXXXQXXPQQQXXXX

SEQ ID NO: 325 - protein, 7 aa, synthetic construct
  REGION 1..7: note = epitope
QPFPQQQ

SEQ ID NO: 326 - protein, 6 aa, synthetic construct
  REGION 1..6: note = epitope
QPFPQQ

SEQ ID NO: 327 - protein, 5 aa, synthetic construct
  REGION 1..5: note = epitope
PFPQQ

SEQ ID NO: 328 - protein, 15 aa, synthetic construct
  REGION 1..15: note = epitope
  REGION 1..4: note = misc_feature - Xaa can be any naturally occurring amino acid
  REGION 6..7: note = misc_feature - Xaa can be any naturally occurring amino acid
  REGION 12..15: note = misc_feature - Xaa can be any naturally occurring amino acid
XXXXQXXPQQQXXXX

SEQ ID NO: 329 - protein, 10 aa, synthetic construct
  REGION 1..10: note = epitope
QPQQPFPQQQ

SEQ ID NO: 330 - protein, 9 aa, synthetic construct
  REGION 1..9: note = epitope
QPFPQQQQP

SEQ ID NO: 331 - protein, 7 aa, synthetic construct
  REGION 1..7: note = epitope
QPFPQQQ

SEQ ID NO: 332 - protein, 15 aa, synthetic construct
  REGION 1..15: note = epitope
  REGION 1..3: note = misc_feature - Xaa can be any naturally occurring amino acid
  SITE 6: note = misc_feature - Xaa can be any naturally occurring amino acid
  SITE 8: note = misc_feature - Xaa can be any naturally occurring amino acid
  REGION 12..15: note = misc_feature - Xaa can be any naturally occurring amino acid
XXXQQXFXQQQXXXX

SEQ ID NO: 333 - protein, 10 aa, synthetic construct
  REGION 1..10: note = epitope
PQQPFPQQQQ

SEQ ID NO: 334 - protein, 7 aa, synthetic construct
  REGION 1..7: note = epitope
PQQPFPQ

SEQ ID NO: 335 - protein, 9 aa, synthetic construct
  REGION 1..9: note = epitope
FPQQQQPLI

SEQ ID NO: 336 - protein, 15 aa, synthetic construct
  REGION 1..15: note = epitope
  REGION 1..2: note = misc_feature - Xaa can be any naturally occurring amino acid
  SITE 6: note = misc_feature - Xaa can be any naturally occurring amino acid
  REGION 10..15: note = misc_feature - Xaa can be any naturally occurring amino acid
XXPQQXFPQXXXXXX

SEQ ID NO: 337 - protein, 15 aa, synthetic construct
  REGION 1..15: note = epitope
  REGION 1..3: note = misc_feature - Xaa can be any naturally occurring amino acid
  SITE 6: note = misc_feature - Xaa can be any naturally occurring amino acid
  REGION 10..15: note = misc_feature - Xaa can be any naturally occurring amino acid
XXXQQXFPQXXXXXX

SEQ ID NO: 338 - protein, 7 aa, synthetic construct
  REGION 1..7: note = epitope
QPFPQQQ

SEQ ID NO: 339 - protein, 6 aa, synthetic construct
  REGION 1..6: note = epitope
QPFPQQ

SEQ ID NO: 340 - protein, 10 aa, synthetic construct
  REGION 1..10: note = epitope
QQPFPQQQQP

SEQ ID NO: 341 - protein, 7 aa, synthetic construct
  REGION 1..7: note = epitope
QPFPQQQ

SEQ ID NO: 342 - protein, 4 aa, synthetic construct
  REGION 1..4: note = epitope
AAAA

SEQ ID NO: 343 - protein, 7 aa, synthetic construct
  REGION 1..7: note = epitope
QPQQPFP

SEQ ID NO: 344 - protein, 7 aa, synthetic construct
  REGION 1..7: note = epitope
  REGION 2..3: note = misc_feature - Xaa can be any naturally occurring amino acid
  SITE 7: note = misc_feature - Xaa can be any naturally occurring amino acid
QXXQPFX

SEQ ID NO: 345 - protein, 4 aa, synthetic construct
  REGION 1..4: note = epitope
QPFP

SEQ ID NO: 346 - protein, 15 aa, synthetic construct
  REGION 1..15: note = epitope
PQQSFPQQQRPFIQP

SEQ ID NO: 347 - protein, 9 aa, synthetic construct
  REGION 1..9: note = epitope
QSFPQQQRP

SEQ ID NO: 348 - protein, 8 aa, synthetic construct
  REGION 1..8: note = epitope
QSFPQQQR

SEQ ID NO: 349 - protein, 8 aa, synthetic construct
  REGION 1..8: note = epitope
QQSFPQQQ

SEQ ID NO: 350 - protein, 6 aa, synthetic construct
  REGION 1..6: note = epitope
QSFPQQ

SEQ ID NO: 351 - protein, 5 aa, synthetic construct
  REGION 1..5: note = epitope
RPFIQ

SEQ ID NO: 352 - protein, 8 aa, synthetic construct
  REGION 1..8: note = epitope
QSFPQQQR

SEQ ID NO: 353 - protein, 7 aa, synthetic construct
  REGION 1..7: note = epitope
QSFPQQQ

SEQ ID NO: 354 - protein, 9 aa, synthetic construct
  REGION 1..9: note = epitope
QQQRPFIQP

SEQ ID NO: 355 - protein, 7 aa, synthetic construct
  REGION 1..7: note = epitope
SFPQQQR

SEQ ID NO: 356 - protein, 6 aa, synthetic construct
  REGION 1..6: note = epitope
SFPQQQ

SEQ ID NO: 357 - protein, 7 aa, synthetic construct
  REGION 1..7: note = epitope
QSFPQQQ

SEQ ID NO: 358 - protein, 6 aa, synthetic construct
  REGION 1..6: note = epitope
SFPQQQ

SEQ ID NO: 359 - protein, 9 aa, synthetic construct
  REGION 1..9: note = epitope
QQQRPFIQP

SEQ ID NO: 360 - protein, 6 aa, synthetic construct
  REGION 1..6: note = epitope
RPFIQP

SEQ ID NO: 361 - protein, 7 aa, synthetic construct
  REGION 1..7: note = epitope
QSFPQQQ

SEQ ID NO: 362 - protein, 6 aa, synthetic construct
  REGION 1..6: note = epitope
RPFIQP

SEQ ID NO: 363 - protein, 9 aa, synthetic construct
  REGION 1..9: note = epitope
QSFPQQQRP

SEQ ID NO: 364 - protein, 7 aa, synthetic construct
  REGION 1..7: note = epitope
QSFPQQQ

SEQ ID NO: 365 - protein, 6 aa, synthetic construct
  REGION 1..6: note = epitope
SFPQQQ

SEQ ID NO: 366 - protein, 6 aa, synthetic construct
  REGION 1..6: note = epitope
RPFIQP

SEQ ID NO: 367 - protein, 9 aa, synthetic construct
  REGION 1..9: note = epitope
QSFPQQQRP

SEQ ID NO: 368 - protein, 6 aa, synthetic construct
  REGION 1..6: note = epitope
QSFPQQ

SEQ ID NO: 369 - protein, 10 aa, synthetic construct
  REGION 1..10: note = epitope
QPQQSFPQQQ

SEQ ID NO: 370 - protein, 10 aa, synthetic construct
  REGION 1..10: note = epitope
  REGION 2..3: note = misc_feature - Xaa can be any naturally occurring amino acid
  REGION 5..7: note = misc_feature - Xaa can be any naturally occurring amino acid
QXXQXXXQQQ

SEQ ID NO: 371 - protein, 7 aa, synthetic construct
  REGION 1..7: note = epitope
QSFPQQQ

SEQ ID NO: 372 - protein, 6 aa, synthetic construct
  REGION 1..6: note = epitope
QSFPQQ

SEQ ID NO: 373 - protein, 10 aa, synthetic construct
  REGION 1..10: note = epitope
QSFPQQQRPF

SEQ ID NO: 374 - protein, 10 aa, synthetic construct
  REGION 1..10: note = epitope
QQSFPQQQRP

SEQ ID NO: 375 - protein, 7 aa, synthetic construct
  REGION 1..7: note = epitope
QSFPQQQ

SEQ ID NO: 376 - protein, 6 aa, synthetic construct
  REGION 1..6: note = epitope
RPFIQP

SEQ ID NO: 377 - protein, 8 aa, synthetic construct
  REGION 1..8: note = epitope
QSFPQQQR

SEQ ID NO: 378 - protein, 7 aa, synthetic construct
  REGION 1..7: note = epitope
QSFPQQQ

SEQ ID NO: 379 - protein, 10 aa, synthetic construct
  REGION 1..10: note = epitope
QQSFPQQQRP

SEQ ID NO: 380 - protein, 7 aa, synthetic construct
  REGION 1..7: note = epitope
QSFPQQQ

SEQ ID NO: 381 - protein, 4 aa, synthetic construct
  REGION 1..4: note = epitope
QSFP

SEQ ID NO: 382 - protein, 15 aa, synthetic construct
  REGION 1..15: note = epitope
  REGION 1..2: note = misc_feature - Xaa can be any naturally occurring amino acid
  REGION 4..6: note = misc_feature - Xaa can be any naturally occurring amino acid
  REGION 11..15: note = misc_feature - Xaa can be any naturally occurring amino acid
XXQXXXQQQRXXXXX

SEQ ID NO: 383 - protein, 9 aa, synthetic construct
  REGION 1..9: note = epitope
QSFPQQQRP

SEQ ID NO: 384 - protein, 8 aa, synthetic construct
  REGION 1..8: note = epitope
QSFPQQQR

SEQ ID NO: 385 - protein, 8 aa, synthetic construct
  REGION 1..8: note = epitope
  REGION 2..4: note = misc_feature - Xaa can be any naturally occurring amino acid
QXXXQQQR

SEQ ID NO: 386 - protein, 10 aa, synthetic construct
  REGION 1..10: note = epitope
PQQQRPFIQP

SEQ ID NO: 387 - protein, 10 aa, synthetic construct
  REGION 1..10: note = epitope
RPFIQPSLQQ

SEQ ID NO: 388 - protein, 9 aa, synthetic construct
  REGION 1..9: note = epitope
RPFIQPSLQ

SEQ ID NO: 389 - protein, 6 aa, synthetic construct
  REGION 1..6: note = epitope
RPFIQP

SEQ ID NO: 390 - protein, 15 aa, synthetic construct
  REGION 1..15: note = epitope
  REGION 1..2: note = misc_feature - Xaa can be any naturally occurring amino acid
  REGION 4..6: note = misc_feature - Xaa can be any naturally occurring amino acid
  SITE 10: note = misc_feature - Xaa can be any naturally occurring amino acid
  REGION 12..15: note = misc_feature - Xaa can be any naturally occurring amino acid
XXQXXXQQQXPXXXX

SEQ ID NO: 391 - protein, 10 aa, synthetic construct
  REGION 1..10: note = epitope
PQQSFPQQQR

SEQ ID NO: 392 - protein, 10 aa, synthetic construct
  REGION 1..10: note = epitope
PQQQRPFIQP

SEQ ID NO: 393 - protein, 10 aa, synthetic construct
  REGION 1..10: note = epitope
  SITE 1: note = misc_feature - Xaa can be any naturally occurring amino acid
  SITE 5: note = misc_feature - Xaa can be any naturally occurring amino acid
  REGION 7..10: note = misc_feature - Xaa can be any naturally occurring amino acid
XQQQXPXXXX

SEQ ID NO: 394 - protein, 4 aa, synthetic construct
  REGION 1..4: note = epitope
QSFP

SEQ ID NO: 395 - protein, 7 aa, synthetic construct
  REGION 1..7: note = epitope
RPFIQPS

SEQ ID NO: 396 - protein, 7 aa, synthetic construct
  REGION 1..7: note = epitope
QSFPQQQ

SEQ ID NO: 397 - protein, 4 aa, synthetic construct
  REGION 1..4: note = epitope
QSFP

SEQ ID NO: 398 - protein, 5 aa, synthetic construct
  REGION 1..5: note = epitope
RPFIQ

SEQ ID NO: 399 - protein, 4 aa, synthetic construct
  REGION 1..4: note = epitope
AAAA

SEQ ID NO: 400 - protein, 4 aa, synthetic construct
  REGION 1..4: note = epitope
QSFP

SEQ ID NO: 401 - protein, 9 aa, synthetic construct
  REGION 1..9: note = epitope
PQQQRPFIQ

SEQ ID NO: 402 - protein, 8 aa, synthetic construct
  REGION 1..8: note = epitope
QQQRPFIQ

SEQ ID NO: 403 - protein, 4 aa, synthetic construct
  REGION 1..4: note = epitope
QSFP

SEQ ID NO: 404 - protein, 7 aa, synthetic construct
  REGION 1..7: note = epitope
QSFPQQQ

SEQ ID NO: 405 - protein, 6 aa, synthetic construct
  REGION 1..6: note = epitope
QSFPQQ

SEQ ID NO: 406 - protein, 9 aa, synthetic construct
  REGION 1..9: note = epitope
QSFPQQQRP

SEQ ID NO: 407 - protein, 7 aa, synthetic construct
  REGION 1..7: note = epitope
QSFPQQQ

SEQ ID NO: 408 - protein, 5 aa, synthetic construct
  REGION 1..5: note = epitope
QQSFP

SEQ ID NO: 409 - protein, 6 aa, synthetic construct
  REGION 1..6: note = epitope
RPFIQP

SEQ ID NO: 410 - protein, 5 aa, synthetic construct
  REGION 1..5: note = epitope
SFPQQ

SEQ ID NO: 411 - protein, 8 aa, synthetic construct
  REGION 1..8: note = epitope
QSFPQQQR

SEQ ID NO: 412 - protein, 5 aa, synthetic construct
  REGION 1..5: note = epitope
RPFIQ

SEQ ID NO: 413 - protein, 4 aa, synthetic construct
  REGION 1..4: note = epitope
RPFI

SEQ ID NO: 414 - protein, 15 aa, synthetic construct
  REGION 1..15: note = epitope
KWRAVLKIGATEPSQ

SEQ ID NO: 415 - protein, 10 aa, synthetic construct
  REGION 1..10: note = epitope
RAVLKIGATE

SEQ ID NO: 416 - protein, 6 aa, synthetic construct
  REGION 1..6: note = epitope
ATEPSQ

SEQ ID NO: 417 - protein, 15 aa, synthetic construct
  REGION 1..15: note = epitope
  SITE 2: note = misc_feature - Xaa can be any naturally occurring amino acid
  REGION 4..6: note = misc_feature - Xaa can be any naturally occurring amino acid
KXRXXXKIGATEPSQ

SEQ ID NO: 418 - protein, 15 aa, synthetic construct
  REGION 1..15: note = epitope
  REGION 1..8: note = misc_feature - Xaa can be any naturally occurring amino acid
  SITE 11: note = misc_feature - Xaa can be any naturally occurring amino acid
XXXXXXXXGAXEPSQ

SEQ ID NO: 419 - protein, 8 aa, synthetic construct
  REGION 1..8: note = epitope
KIGATEPS

SEQ ID NO: 420 - protein, 8 aa, synthetic construct
  REGION 1..8: note = epitope
  REGION 1..2: note = misc_feature - Xaa can be any naturally occurring amino acid
  SITE 5: note = misc_feature - Xaa can be any naturally occurring amino acid
XXGAXEPS

SEQ ID NO: 421 - protein, 9 aa, synthetic construct
  REGION 1..9: note = epitope
WRAVLKIGA

SEQ ID NO: 422 - protein, 7 aa, synthetic construct
  REGION 1..7: note = epitope
RAVLKIG

SEQ ID NO: 423 - protein, 15 aa, synthetic construct
  REGION 1..15: note = epitope
  REGION 1..6: note = misc_feature - Xaa can be any naturally occurring amino acid
  REGION 8..10: note = misc_feature - Xaa can be any naturally occurring amino acid
  SITE 12: note = misc_feature - Xaa can be any naturally occurring amino acid
XXXXXXKXXXTXPSQ

SEQ ID NO: 424 - protein, 5 aa, synthetic construct
  REGION 1..5: note = epitope
IGATE

SEQ ID NO: 425 - protein, 15 aa, synthetic construct
  REGION 1..15: note = epitope
  REGION 1..2: note = misc_feature - Xaa can be any naturally occurring amino acid
  REGION 4..6: note = misc_feature - Xaa can be any naturally occurring amino acid
  SITE 12: note = misc_feature - Xaa can be any naturally occurring amino acid
XXRXXXKIGATXPSQ

SEQ ID NO: 426 - protein, 6 aa, synthetic construct
  REGION 1..6: note = epitope
AVLKIG

SEQ ID NO: 427 - protein, 9 aa, synthetic construct
  REGION 1..9: note = epitope
WRAVLKIGA

SEQ ID NO: 428 - protein, 5 aa, synthetic construct
  REGION 1..5: note = epitope
WRAVL

SEQ ID NO: 429 - protein, 4 aa, synthetic construct
  REGION 1..4: note = epitope
RAVL

SEQ ID NO: 430 - protein, 9 aa, synthetic construct
  REGION 1..9: note = epitope
KIGATEPSQ

SEQ ID NO: 431 - protein, 6 aa, synthetic construct
  REGION 1..6: note = epitope
ATEPSQ

SEQ ID NO: 432 - protein, 8 aa, synthetic construct
  REGION 1..8: note = epitope
RAVLKIGA

SEQ ID NO: 433 - protein, 10 aa, synthetic construct
  REGION 1..10: note = epitope
VLKIGATEPS

SEQ ID NO: 434 - protein, 7 aa, synthetic construct
  REGION 1..7: note = epitope
IGATEPS

SEQ ID NO: 435 - protein, 15 aa, synthetic construct
  REGION 1..15: note = epitope
  REGION 1..6: note = misc_feature - Xaa can be any naturally occurring amino acid
  REGION 8..9: note = misc_feature - Xaa can be any naturally occurring amino acid
  REGION 11..12: note = misc_feature - Xaa can be any naturally occurring amino acid
XXXXXXKXXAXXPSQ

SEQ ID NO: 436 - protein, 7 aa, synthetic construct
  REGION 1..7: note = epitope
KIGATEP

SEQ ID NO: 437 - protein, 9 aa, synthetic construct
  REGION 1..9: note = epitope
KIGATEPSQ

SEQ ID NO: 438 - protein, 9 aa, synthetic construct
  REGION 1..9: note = epitope
  REGION 2..3: note = misc_feature - Xaa can be any naturally occurring amino acid
  REGION 5..6: note = misc_feature - Xaa can be any naturally occurring amino acid
  SITE 8: note = misc_feature - Xaa can be any naturally occurring amino acid
KXXAXXPXQ

SEQ ID NO: 439 - protein, 15 aa, synthetic construct
  REGION 1..15: note = epitope
  REGION 1..6: note = misc_feature - Xaa can be any naturally occurring amino acid
  SITE 8: note = misc_feature - Xaa can be any naturally occurring amino acid
  SITE 11: note = misc_feature - Xaa can be any naturally occurring amino acid
  REGION 13..14: note = misc_feature - Xaa can be any naturally occurring amino acid
XXXXXXKXGAXEXXQ

SEQ ID NO: 440 - protein, 6 aa, synthetic construct
  REGION 1..6: note = epitope
KIGATE

SEQ ID NO: 441 - protein, 6 aa, synthetic construct
  REGION 1..6: note = epitope
  SITE 2: note = misc_feature - Xaa can be any naturally occurring amino acid
  SITE 5: note = misc_feature - Xaa can be any naturally occurring amino acid
KXGAXE

SEQ ID NO: 442 - protein, 15 aa, synthetic construct
  REGION 1..15: note = epitope
  REGION 4..12: note = misc_feature - Xaa can be any naturally occurring amino acid
KWRXXXXXXXXXPSQ

SEQ ID NO: 443 - protein, 10 aa, synthetic construct
  REGION 1..10: note = epitope
KWRAVLKIGA

SEQ ID NO: 444 - protein, 8 aa, synthetic construct
  REGION 1..8: note = epitope
WRAVLKIG

SEQ ID NO: 445 - protein, 4 aa, synthetic construct
  REGION 1..4: note = epitope
RAVL

SEQ ID NO: 446 - protein, 8 aa, synthetic construct
  REGION 1..8: note = epitope
IGATEPSQ

SEQ ID NO: 447 - protein, 5 aa, synthetic construct
  REGION 1..5: note = epitope
ATEPS

SEQ ID NO: 448 - protein, 15 aa, synthetic construct
  REGION 1..15: note = epitope
  REGION 5..6: note = misc_feature - Xaa can be any naturally occurring amino acid
  REGION 8..10: note = misc_feature - Xaa can be any naturally occurring amino acid
KWRAXXKXXXTEPSQ

SEQ ID NO: 449 - protein, 15 aa, synthetic construct
  REGION 1..15: note = epitope
  SITE 2: note = misc_feature - Xaa can be any naturally occurring amino acid
  REGION 4..6: note = misc_feature - Xaa can be any naturally occurring amino acid
  REGION 8..11: note = misc_feature - Xaa can be any naturally occurring amino acid
KXRXXXKXXXXEPSQ

SEQ ID NO: 450 - protein, 10 aa, synthetic construct
  REGION 1..10: note = epitope
AKWRAVLKIG

SEQ ID NO: 451 - protein, 10 aa, synthetic construct
  REGION 1..10: note = epitope
  REGION 6..7: note = misc_feature - Xaa can be any naturally occurring amino acid
  REGION 9..10: note = misc_feature - Xaa can be any naturally occurring amino acid
AKWRAXXKXX

SEQ ID NO: 452 - protein, 10 aa, synthetic construct
  REGION 1..10: note = epitope
  SITE 3: note = misc_feature - Xaa can be any naturally occurring amino acid
  REGION 5..7: note = misc_feature - Xaa can be any naturally occurring amino acid
  REGION 9..10: note = misc_feature - Xaa can be any naturally occurring amino acid
AKXRXXXKXX

SEQ ID NO: 453 - protein, 4 aa, synthetic construct
  REGION 1..4: note = epitope
VLKI

SEQ ID NO: 454 - protein, 15 aa, synthetic construct
  REGION 1..15: note = epitope
  REGION 1..6: note = misc_feature - Xaa can be any naturally occurring amino acid
  REGION 8..9: note = misc_feature - Xaa can be any naturally occurring amino acid
  SITE 11: note = misc_feature - Xaa can be any naturally occurring amino acid
XXXXXXKXXAXEPSQ

SEQ ID NO: 455 - protein, 8 aa, synthetic construct
  REGION 1..8: note = epitope
KIGATEPS

SEQ ID NO: 456 - protein, 7 aa, synthetic construct
  REGION 1..7: note = epitope
KIGATEP

SEQ ID NO: 457 - protein, 5 aa, synthetic construct
  REGION 1..5: note = epitope
IGATE

SEQ ID NO: 458 - protein, 15 aa, synthetic construct
  REGION 1..15: note = epitope
  REGION 2..6: note = misc_feature - Xaa can be any naturally occurring amino acid
  SITE 8: note = misc_feature - Xaa can be any naturally occurring amino acid
  REGION 10..12: note = misc_feature - Xaa can be any naturally occurring amino acid
KXXXXXKXGXXXPSQ

SEQ ID NO: 459 - protein, 10 aa, synthetic construct
  REGION 1..10: note = epitope
WRAVLKIGAT

SEQ ID NO: 460 - protein, 8 aa, synthetic construct
  REGION 1..8: note = epitope
RAVLKIGA

SEQ ID NO: 461 - protein, 7 aa, synthetic construct
  REGION 1..7: note = epitope
GATEPSQ

SEQ ID NO: 462 - protein, 7 aa, synthetic construct
  REGION 1..7: note = epitope
  REGION 2..4: note = misc_feature - Xaa can be any naturally occurring amino acid
GXXXPSQ

SEQ ID NO: 463 - protein, 6 aa, synthetic construct
  REGION 1..6: note = epitope
GATEPS

SEQ ID NO: 464 - protein, 8 aa, synthetic construct
  REGION 1..8: note = epitope
KIGATEPS

SEQ ID NO: 465 - protein, 7 aa, synthetic construct
  REGION 1..7: note = epitope
IGATEPS

SEQ ID NO: 466 - protein, 15 aa, synthetic construct
  REGION 1..15: note = epitope
  REGION 4..8: note = misc_feature - Xaa can be any naturally occurring amino acid
KWRXXXXXGATEPSQ

SEQ ID NO: 467 - protein, 15 aa, synthetic construct
  REGION 1..15: note = epitope
  SITE 2: note = misc_feature - Xaa can be any naturally occurring amino acid
  REGION 4..10: note = misc_feature - Xaa can be any naturally occurring amino acid
KXRXXXXXXXTEPSQ

SEQ ID NO: 468 - protein, 6 aa, synthetic construct
  REGION 1..6: note = epitope
RAVLKI

SEQ ID NO: 469 - protein, 15 aa, synthetic construct
  REGION 1..15: note = epitope
  REGION 1..6: note = misc_feature - Xaa can be any naturally occurring amino acid
  SITE 11: note = misc_feature - Xaa can be any naturally occurring amino acid
XXXXXXKIGAXEPSQ

SEQ ID NO: 470 - protein, 15 aa, synthetic construct
  REGION 1..15: note = epitope
  REGION 1..6: note = misc_feature - Xaa can be any naturally occurring amino acid
  REGION 9..12: note = misc_feature - Xaa can be any naturally occurring amino acid
XXXXXXKIXXXXPSQ

SEQ ID NO: 471 - protein, 10 aa, synthetic construct
  REGION 1..10: note = epitope
KWRAVLKIGA

SEQ ID NO: 472 - protein, 10 aa, synthetic construct
  REGION 1..10: note = epitope
  REGION 1..6: note = misc_feature - Xaa can be any naturally occurring amino acid
XXXXXXKIGA

SEQ ID NO: 473 - protein, 10 aa, synthetic construct
  REGION 1..10: note = epitope
RAVLKIGATE

SEQ ID NO: 474 - protein, 10 aa, synthetic construct
  REGION 1..10: note = epitope
  REGION 1..4: note = misc_feature - Xaa can be any naturally occurring amino acid
  SITE 9: note = misc_feature - Xaa can be any naturally occurring amino acid
XXXXKIGAXE

SEQ ID NO: 475 - protein, 10 aa, synthetic construct
  REGION 1..10: note = epitope
VLKIGATEPS

SEQ ID NO: 476 - protein, 9 aa, synthetic construct
  REGION 1..9: note = epitope
LKIGATEPS

SEQ ID NO: 477 - protein, 8 aa, synthetic construct
  REGION 1..8: note = epitope
KIGATEPS

SEQ ID NO: 478 - protein, 8 aa, synthetic construct
  REGION 1..8: note = epitope
  SITE 5: note = misc_feature - Xaa can be any naturally occurring amino acid
KIGAXEPS

SEQ ID NO: 479 - protein, 8 aa, synthetic construct
  REGION 1..8: note = epitope
  REGION 3..6: note = misc_feature - Xaa can be any naturally occurring amino acid
KIXXXXPS

SEQ ID NO: 480 - protein, 15 aa, synthetic construct
  REGION 1..15: note = epitope
  REGION 1..6: note = misc_feature - Xaa can be any naturally occurring amino acid
  SITE 8: note = misc_feature - Xaa can be any naturally occurring amino acid
  REGION 11..14: note = misc_feature - Xaa can be any naturally occurring amino acid
XXXXXXKXGAXXXXQ

SEQ ID NO: 481 - protein, 8 aa, synthetic construct
  REGION 1..8: note = epitope
RAVLKIGA

SEQ ID NO: 482 - protein, 4 aa, synthetic construct
  REGION 1..4: note = epitope
LKIG

SEQ ID NO: 483 - protein, 15 aa, synthetic construct
  REGION 1..15: note = epitope
  REGION 1..6: note = misc_feature - Xaa can be any naturally occurring amino acid
  REGION 8..9: note = misc_feature - Xaa can be any naturally occurring amino acid
  REGION 11..12: note = misc_feature - Xaa can be any naturally occurring amino acid
XXXXXXKXXAXXPSQ

SEQ ID NO: 484 - protein, 10 aa, synthetic construct
  REGION 1..10: note = epitope
LKIGATEPSQ

SEQ ID NO: 485 - protein, 10 aa, synthetic construct
  REGION 1..10: note = epitope
  SITE 1: note = misc_feature - Xaa can be any naturally occurring amino acid
  REGION 3..4: note = misc_feature - Xaa can be any naturally occurring amino acid
  REGION 6..7: note = misc_feature - Xaa can be any naturally occurring amino acid
XKXXAXXPSQ

SEQ ID NO: 486 - protein, 6 aa, synthetic construct
  REGION 1..6: note = epitope
KIGATE

SEQ ID NO: 487 - protein, 4 aa, synthetic construct
  REGION 1..4: note = epitope
IGAT

SEQ ID NO: 488 - protein, 9 aa, synthetic construct
  REGION 1..9: note = epitope
KWRAVLKIG

SEQ ID NO: 489 - protein, 8 aa, synthetic construct
  REGION 1..8: note = epitope
KIGATEPS

SEQ ID NO: 490 - protein, 10 aa, synthetic construct
  REGION 1..10: note = epitope
KWRAVLKIGA

SEQ ID NO: 491 - protein, 6 aa, synthetic construct
  REGION 1..6: note = epitope
KIGATE

SEQ ID NO: 492 - protein, 4 aa, synthetic construct
  REGION 1..4: note = epitope
KIGA

SEQ ID NO: 493 - protein, 15 aa, synthetic construct
  REGION 1..15: note = epitope
PQQPYPQQQPQYLQP

SEQ ID NO: 494 - protein, 15 aa, synthetic construct
  REGION 1..15: note = epitope
  REGION 2..6: note = misc_feature - Xaa can be any naturally occurring amino acid
PXXXXXQQQPQYLQP

SEQ ID NO: 495 - protein, 4 aa, synthetic construct
  REGION 1..4: note = epitope
QQQP

SEQ ID NO: 496 - protein, 7 aa, synthetic construct
  REGION 1..7: note = epitope
QPYPQQQ

SEQ ID NO: 497 - protein, 10 aa, synthetic construct
  REGION 1..10: note = epitope
YPQQQPQYLQ

SEQ ID NO: 498 - protein, 15 aa, synthetic construct
  REGION 1..15: note = epitope
  REGION 1..6: note = misc_feature - Xaa can be any naturally occurring amino acid
  SITE 10: note = misc_feature - Xaa can be any naturally occurring amino acid
  REGION 12..15: note = misc_feature - Xaa can be any naturally occurring amino acid
XXXXXXQQQXQXXXX

SEQ ID NO: 499 - protein, 4 aa, synthetic construct
  REGION 1..4: note = epitope
YPQQ

SEQ ID NO: 500 - protein, 9 aa, synthetic construct
  REGION 1..9: note = epitope
PQQPYPQQQ

SEQ ID NO: 501 - protein, 10 aa, synthetic construct
  REGION 1..10: note = epitope
QPYPQQQPQY

SEQ ID NO: 502 - protein, 10 aa, synthetic construct
  REGION 1..10: note = epitope
  REGION 1..4: note = misc_feature - Xaa can be any naturally occurring amino acid
XXXXQQQPQY

SEQ ID NO: 503 - protein, 10 aa, synthetic construct
  REGION 1..10: note = epitope
YPQQQPQYLQ

SEQ ID NO: 504 - protein, 10 aa, synthetic construct
  REGION 1..10: note = epitope
  REGION 1..2: note = misc_feature - Xaa can be any naturally occurring amino acid
  REGION 9..10: note = misc_feature - Xaa can be any naturally occurring amino acid
XXQQQPQYXX

SEQ ID NO: 505 - protein, 5 aa, synthetic construct
  REGION 1..5: note = epitope
PQQQP

SEQ ID NO: 506 - protein, 15 aa, synthetic construct
  REGION 1..15: note = epitope
  REGION 1..7: note = misc_feature - Xaa can be any naturally occurring amino acid
  SITE 10: note = misc_feature - Xaa can be any naturally occurring amino acid
  REGION 14..15: note = misc_feature - Xaa can be any naturally occurring amino acid
XXXXXXXQQXQYLXX

SEQ ID NO: 507 - protein, 15 aa, synthetic construct
  REGION 1..15: note = epitope
  REGION 1..7: note = misc_feature - Xaa can be any naturally occurring amino acid
  REGION 13..15: note = misc_feature - Xaa can be any naturally occurring amino acid
XXXXXXXQQPQYXXX

SEQ ID NO: 508 - protein, 7 aa, synthetic construct
  REGION 1..7: note = epitope
QPYPQQQ

SEQ ID NO: 509 - protein, 5 aa, synthetic construct
  REGION 1..5: note = epitope
YPQQQ

SEQ ID NO: 510 - protein, 15 aa, synthetic construct
  REGION 1..15: note = epitope
  REGION 1..2: note = misc_feature - Xaa can be any naturally occurring amino acid
  REGION 4..6: note = misc_feature - Xaa can be any naturally occurring amino acid
  SITE 10: note = misc_feature - Xaa can be any naturally occurring amino acid
  REGION 14..15: note = misc_feature - Xaa can be any naturally occurring amino acid
XXQXXXQQQXQYLXX

SEQ ID NO: 511 - protein, 9 aa, synthetic construct
  REGION 1..9: note = epitope
QPYPQQQPQ

SEQ ID NO: 512 - protein, 7 aa, synthetic construct
  REGION 1..7: note = epitope
QPYPQQQ

SEQ ID NO: 513 - protein, 10 aa, synthetic construct
  REGION 1..10: note = epitope
YPQQQPQYLQ

SEQ ID NO: 514 - protein, 10 aa, synthetic construct
  REGION 1..10: note = epitope
  REGION 1..2: note = misc_feature - Xaa can be any naturally occurring amino acid
  SITE 6: note = misc_feature - Xaa can be any naturally occurring amino acid
  SITE 10: note = misc_feature - Xaa can be any naturally occurring amino acid
XXQQQXQYLX

SEQ ID NO: 515 - protein, 15 aa, synthetic construct
  REGION 1..15: note = epitope
  REGION 1..11: note = misc_feature - Xaa can be any naturally occurring amino acid
XXXXXXXXXXXYLQP

SEQ ID NO: 516 - protein, 10 aa, synthetic construct
  REGION 1..10: note = epitope
PQQPYPQQQP

SEQ ID NO: 517 - protein, 6 aa, synthetic construct
  REGION 1..6: note = epitope
QQQPQY

SEQ ID NO: 518 - protein, 15 aa, synthetic construct
  REGION 1..15: note = epitope
  REGION 1..7: note = misc_feature - Xaa can be any naturally occurring amino acid
  SITE 10: note = misc_feature - Xaa can be any naturally occurring amino acid
  REGION 12..14: note = misc_feature - Xaa can be any naturally occurring amino acid
XXXXXXXQQXQXXXP

SEQ ID NO: 519 - protein, 10 aa, synthetic construct
  REGION 1..10: note = epitope
QQPYPQQQPQ

SEQ ID NO: 520 - protein, 10 aa, synthetic construct
  REGION 1..10: note = epitope
YPQQQPQYLQ

SEQ ID NO: 521 - protein, 6 aa, synthetic construct
  REGION 1..6: note = epitope
YPQQQP

SEQ ID NO: 522 - protein, 10 aa, synthetic construct
  REGION 1..10: note = epitope
YPQQQPQYLQ

SEQ ID NO: 523 - protein, 6 aa, synthetic construct
  REGION 1..6: note = epitope
QPYPQQ

SEQ ID NO: 524 - protein, 4 aa, synthetic construct
  REGION 1..4: note = epitope
YPQQ

SEQ ID NO: 525 - protein, 15 aa, synthetic construct
  REGION 1..15: note = epitope
  REGION 1..2: note = misc_feature - Xaa can be any naturally occurring amino acid
  REGION 4..5: note = misc_feature - Xaa can be any naturally occurring amino acid
  REGION 13..15: note = misc_feature - Xaa can be any naturally occurring amino acid
XXQXXPQQQPQYXXX

SEQ ID NO: 526 - protein, 10 aa, synthetic construct
  REGION 1..10: note = epitope
PYPQQQPQYL

SEQ ID NO: 527 - protein, 8 aa, synthetic construct
  REGION 1..8: note = epitope
PYPQQQPQ

SEQ ID NO: 528 - protein, 8 aa, synthetic construct
  REGION 1..8: note = epitope
  REGION 1..2: note = misc_feature - Xaa can be any naturally occurring amino acid
XXPQQQPQ

SEQ ID NO: 529 - protein, 8 aa, synthetic construct
  REGION 1..8: note = epitope
  REGION 1..3: note = misc_feature - Xaa can be any naturally occurring amino acid
XXXQQQPQ

SEQ ID NO: 530 - protein, 15 aa, synthetic construct
  REGION 1..15: note = epitope
  REGION 1..4: note = misc_feature - Xaa can be any naturally occurring amino acid
  REGION 13..15: note = misc_feature - Xaa can be any naturally occurring amino acid
XXXXYPQQQPQYXXX

SEQ ID NO: 531 - protein, 8 aa, synthetic construct
  REGION 1..8: note = epitope
QQPYPQQQ

SEQ ID NO: 532 - protein, 7 aa, synthetic construct
  REGION 1..7: note = epitope
QQPYPQQ

SEQ ID NO: 533 - protein, 7 aa, synthetic construct
  REGION 1..7: note = epitope
  REGION 1..3: note = misc_feature - Xaa can be any naturally occurring amino acid
XXXYPQQ

SEQ ID NO: 534 - protein, 10 aa, synthetic construct
  REGION 1..10: note = epitope
YPQQQPQYLQ

SEQ ID NO: 535 - protein, 10 aa, synthetic construct
  REGION 1..10: note = epitope
  REGION 9..10: note = misc_feature - Xaa can be any naturally occurring amino acid
YPQQQPQYXX

SEQ ID NO: 536 - protein, 15 aa, synthetic construct
  REGION 1..15: note = epitope
  REGION 1..2: note = misc_feature - Xaa can be any naturally occurring amino acid
  REGION 4..7: note = misc_feature - Xaa can be any naturally occurring amino acid
  SITE 10: note = misc_feature - Xaa can be any naturally occurring amino acid
  SITE 15: note = misc_feature - Xaa can be any naturally occurring amino acid
XXQXXXXQQXQYLQX

SEQ ID NO: 537 - protein, 15 aa, synthetic construct
  REGION 1..15: note = epitope
  REGION 1..7: note = misc_feature - Xaa can be any naturally occurring amino acid
  REGION 10..11: note = misc_feature - Xaa can be any naturally occurring amino acid
  REGION 14..15: note = misc_feature - Xaa can be any naturally occurring amino acid
XXXXXXXQQXXYLXX

SEQ ID NO: 538 - protein, 4 aa, synthetic construct
  REGION 1..4: note = epitope
QQQP

SEQ ID NO: 539 - protein, 5 aa, synthetic construct
  REGION 1..5: note = epitope
YPQQQ

SEQ ID NO: 540 - protein, 15 aa, synthetic construct
  REGION 1..15: note = epitope
  SITE 2: note = misc_feature - Xaa can be any naturally occurring amino acid
  REGION 4..6: note = misc_feature - Xaa can be any naturally occurring amino acid
  REGION 8..11: note = misc_feature - Xaa can be any naturally occurring amino acid
  REGION 14..15: note = misc_feature - Xaa can be any naturally occurring amino acid
PXQXXXQXXXXYLXX

SEQ ID NO: 541 - protein, 15 aa, synthetic construct
  REGION 1..15: note = epitope
  REGION 1..7: note = misc_feature - Xaa can be any naturally occurring amino acid
XXXXXXXQQPQYLQP

SEQ ID NO: 542 - protein, 15 aa, synthetic construct
  REGION 1..15: note = epitope
  REGION 1..8: note = misc_feature - Xaa can be any naturally occurring amino acid
  SITE 10: note = misc_feature - Xaa can be any naturally occurring amino acid
XXXXXXXXQXQYLQP

SEQ ID NO: 543 - protein, 9 aa, synthetic construct
  REGION 1..9: note = epitope
PQQPYPQQQ

SEQ ID NO: 544 - protein, 8 aa, synthetic construct
  REGION 1..8: note = epitope
YPQQQPQY

SEQ ID NO: 545 - protein, 8 aa, synthetic construct
  REGION 1..8: note = epitope
  REGION 1..3: note = misc_feature - Xaa can be any naturally occurring amino acid
XXXQQPQY

SEQ ID NO: 546 - protein, 15 aa, synthetic construct
  REGION 1..15: note = epitope
  REGION 1..2: note = misc_feature - Xaa can be any naturally occurring amino acid
  REGION 4..7: note = misc_feature - Xaa can be any naturally occurring amino acid
  REGION 9..11: note = misc_feature - Xaa can be any naturally occurring amino acid
  REGION 14..15: note = misc_feature - Xaa can be any naturally occurring amino acid
XXQXXXXQXXXYLXX

SEQ ID NO: 547 - protein, 4 aa, synthetic construct
  REGION 1..4: note = epitope
PQQQ

SEQ ID NO: 548 - protein, 15 aa, synthetic construct
  REGION 1..15: note = epitope
  REGION 1..2: note = misc_feature - Xaa can be any naturally occurring amino acid
  REGION 4..6: note = misc_feature - Xaa can be any naturally occurring amino acid
  REGION 12..15: note = misc_feature - Xaa can be any naturally occurring amino acid
XXQXXXQQQPQXXXX

SEQ ID NO: 549 - protein, 7 aa, synthetic construct
  REGION 1..7: note = epitope
QPYPQQQ

SEQ ID NO: 550 - protein, 10 aa, synthetic construct
  REGION 1..10: note = epitope
YPQQQPQYLQ

SEQ ID NO: 551 - protein, 4 aa, synthetic construct
  REGION 1..4: note = epitope
PQQQ

SEQ ID NO: 552 - protein, 6 aa, synthetic construct
  REGION 1..6: note = epitope
QPQYLQ

SEQ ID NO: 553 - protein, 15 aa, synthetic construct
  REGION 1..15: note = epitope
  REGION 1..7: note = misc_feature - Xaa can be any naturally occurring amino acid
  REGION 9..10: note = misc_feature - Xaa can be any naturally occurring amino acid
  REGION 14..15: note = misc_feature - Xaa can be any naturally occurring amino acid
XXXXXXXQXXQYLXX

SEQ ID NO: 554 - protein, 15 aa, synthetic construct
  REGION 1..15: note = epitope
  REGION 1..2: note = misc_feature - Xaa can be any naturally occurring amino acid
  SITE 13: note = misc_feature - Xaa can be any naturally occurring amino acid
XXQPYPQQQPQYXQP

SEQ ID NO: 555 - protein, 10 aa, synthetic construct
  REGION 1..10: note = epitope
PQQPYPQQQP

SEQ ID NO: 556 - protein, 10 aa, synthetic construct
  REGION 1..10: note = epitope
  REGION 1..2: note = misc_feature - Xaa can be any naturally occurring amino acid
XXQPYPQQQP

SEQ ID NO: 557 - protein, 10 aa, synthetic construct
  REGION 1..10: note = epitope
YPQQQPQYLQ

SEQ ID NO: 558 - protein, 8 aa, synthetic construct
  REGION 1..8: note = epitope
YPQQQPQY

SEQ ID NO: 559 - protein, 8 aa, synthetic construct
  REGION 1..8: note = epitope
  REGION 1..3: note = misc_feature - Xaa can be any naturally occurring amino acid
XXXQQPQY

SEQ ID NO: 560 - protein, 6 aa, synthetic construct
  REGION 1..6: note = epitope
QQQPQY

SEQ ID NO: 561 - protein, 6 aa, synthetic construct
  REGION 1..6: note = epitope
PQQPYP

SEQ ID NO: 562 - protein, 15 aa, synthetic construct
  REGION 1..15: note = epitope
KPSQQQPLPLQQILW

SEQ ID NO: 563 - protein, 15 aa, synthetic construct
  REGION 1..15: note = epitope
  REGION 1..3: note = misc_feature - Xaa can be any naturally occurring amino acid
  REGION 7..9: note = misc_feature - Xaa can be any naturally occurring amino acid
  REGION 13..15: note = misc_feature - Xaa can be any naturally occurring amino acid
XXXQQQXXXLQQXXX

SEQ ID NO: 564 - protein, 6 aa, synthetic construct
  REGION 1..6: note = epitope
KPSQQQ

SEQ ID NO: 565 - protein, 8 aa, synthetic construct
  REGION 1..8: note = epitope
QQPLPLQQ

SEQ ID NO: 566 - protein, 8 aa, synthetic construct
  REGION 1..8: note = epitope
  REGION 3..5: note = misc_feature - Xaa can be any naturally occurring amino acid
QQXXXLQQ

SEQ ID NO: 567 - protein, 5 aa, synthetic construct
  REGION 1..5: note = epitope
PSQQQ

SEQ ID NO: 568 - protein, 4 aa, synthetic construct
  REGION 1..4: note = epitope
SQQQ

SEQ ID NO: 569 - protein, 8 aa, synthetic construct
  REGION 1..8: note = epitope
SQQQPLPL

SEQ ID NO: 570 - protein, 15 aa, synthetic construct
  REGION 1..15: note = epitope
  REGION 1..4: note = misc_feature - Xaa can be any naturally occurring amino acid
  REGION 7..8: note = misc_feature - Xaa can be any naturally occurring amino acid
  REGION 13..15: note = misc_feature - Xaa can be any naturally occurring amino acid
XXXXQQXXPLQQXXX

SEQ ID NO: 571 - protein, 9 aa, synthetic construct
  REGION 1..9: note = epitope
QPLPLQQIL

SEQ ID NO: 572 - protein, 8 aa, synthetic construct
  REGION 1..8: note = epitope
QPLPLQQI

SEQ ID NO: 573 - protein, 8 aa, synthetic construct
  REGION 1..8: note = epitope
  REGION 2..3: note = misc_feature - Xaa can be any naturally occurring amino acid
  SITE 8: note = misc_feature - Xaa can be any naturally occurring amino acid
QXXPLQQX

SEQ ID NO: 574 - protein, 8 aa, synthetic construct
  REGION 1..8: note = epitope
  REGION 2..4: note = misc_feature - Xaa can be any naturally occurring amino acid
  SITE 8: note = misc_feature - Xaa can be any naturally occurring amino acid
QXXXLQQX

SEQ ID NO: 575 - protein, 15 aa, synthetic construct
  REGION 1..15: note = epitope
  REGION 1..4: note = misc_feature - Xaa can be any naturally occurring amino acid
  SITE 8: note = misc_feature - Xaa can be any naturally occurring amino acid
  REGION 13..15: note = misc_feature - Xaa can be any naturally occurring amino acid
XXXXQQPXPLQQXXX

SEQ ID NO: 576 - protein, 15 aa, synthetic construct
  REGION 1..15: note = epitope
  REGION 1..4: note = misc_feature - Xaa can be any naturally occurring amino acid
  REGION 7..8: note = misc_feature - Xaa can be any naturally occurring amino acid
  REGION 13..15: note = misc_feature - Xaa can be any naturally occurring amino acid
XXXXQQXXPLQQXXX

SEQ ID NO: 577 - protein, 15 aa, synthetic construct
  REGION 1..15: note = epitope
  REGION 1..5: note = misc_feature - Xaa can be any naturally occurring amino acid
  REGION 7..8: note = misc_feature - Xaa can be any naturally occurring amino acid
  REGION 13..15: note = misc_feature - Xaa can be any naturally occurring amino acid
XXXXXQXXPLQQXXX

SEQ ID NO: 578 - protein, 7 aa, synthetic construct
  REGION 1..7: note = epitope
QPLPLQQ

SEQ ID NO: 579 - protein, 4 aa, synthetic construct
  REGION 1..4: note = epitope
PLQQ

SEQ ID NO: 580 - protein, 15 aa, synthetic construct
  REGION 1..15: note = epitope
  REGION 1..3: note = misc_feature - Xaa can be any naturally occurring amino acid
  SITE 5: note = misc_feature - Xaa can be any naturally occurring amino acid
  SITE 8: note = misc_feature - Xaa can be any naturally occurring amino acid
  REGION 14..15: note = misc_feature - Xaa can be any naturally occurring amino acid
XXXQXQPXPLQQIXX

SEQ ID NO: 581 - protein, 15 aa, synthetic construct
  REGION 1..15: note = epitope
  REGION 1..5: note = misc_feature - Xaa can be any naturally occurring amino acid
  SITE 8: note = misc_feature - Xaa can be any naturally occurring amino acid
  REGION 14..15: note = misc_feature - Xaa can be any naturally occurring amino acid
XXXXXQPXPLQQIXX

SEQ ID NO: 582 - protein, 7 aa, synthetic construct
  REGION 1..7: note = epitope
QPLPLQQ

SEQ ID NO: 583 - protein, 7 aa, synthetic construct
  REGION 1..7: note = epitope
  SITE 3: note = misc_feature - Xaa can be any naturally occurring amino acid
QPXPLQQ

SEQ ID NO: 584 - protein, 7 aa, synthetic construct
  REGION 1..7: note = epitope
  REGION 2..3: note = misc_feature - Xaa can be any naturally occurring amino acid
QXXPLQQ

SEQ ID NO: 585 - protein, 15 aa, synthetic construct
  REGION 1..15: note = epitope
  REGION 1..5: note = misc_feature - Xaa can be any naturally occurring amino acid
  SITE 8: note = misc_feature - Xaa can be any naturally occurring amino acid
  REGION 13..15: note = misc_feature - Xaa can be any naturally occurring amino acid
XXXXXQPXPLQQXXX

SEQ ID NO: 586 - protein, 15 aa, synthetic construct
  REGION 1..15: note = epitope
  REGION 1..6: note = misc_feature - Xaa can be any naturally occurring amino acid
  SITE 8: note = misc_feature - Xaa can be any naturally occurring amino acid
  REGION 13..15: note = misc_feature - Xaa can be any naturally occurring amino acid
XXXXXXPXPLQQXXX

SEQ ID NO: 587 - protein, 10 aa, synthetic construct
  REGION 1..10: note = epitope
LEKPSQQQPL

SEQ ID NO: 588 - protein, 6 aa, synthetic construct
  REGION 1..6: note = epitope
KPSQQQ

SEQ ID NO: 589 - protein, 8 aa, synthetic construct
  REGION 1..8: note = epitope
QQPLPLQQ

SEQ ID NO: 590 - protein, 8 aa, synthetic construct
  REGION 1..8: note = epitope
  SITE 1: note = misc_feature - Xaa can be any naturally occurring amino acid
  SITE 4: note = misc_feature - Xaa can be any naturally occurring amino acid
XQPXPLQQ

SEQ ID NO: 591 - protein, 8 aa, synthetic construct
  REGION 1..8: note = epitope
  REGION 1..2: note = misc_feature - Xaa can be any naturally occurring amino acid
  SITE 4: note = misc_feature - Xaa can be any naturally occurring amino acid
XXPXPLQQ

SEQ ID NO: 592 - protein, 15 aa, synthetic construct
  REGION 1..15: note = epitope
  REGION 2..5: note = misc_feature - Xaa can be any naturally occurring amino acid
  REGION 7..9: note = misc_feature - Xaa can be any naturally occurring amino acid
  REGION 12..15: note = misc_feature - Xaa can be any naturally occurring amino acid
KXXXXQXXXLQXXXX

SEQ ID NO: 593 - protein, 15 aa, synthetic construct
  REGION 1..15: note = epitope
  REGION 1..2: note = misc_feature - Xaa can be any naturally occurring amino acid
  REGION 7..8: note = misc_feature - Xaa can be any naturally occurring amino acid
  REGION 13..15: note = misc_feature - Xaa can be any naturally occurring amino acid
XXSQQQXXPLQQXXX

SEQ ID NO: 594 - protein, 15 aa, synthetic construct
  REGION 1..15: note = epitope
  REGION 1..4: note = misc_feature - Xaa can be any naturally occurring amino acid
  REGION 7..8: note = misc_feature - Xaa can be any naturally occurring amino acid
  REGION 13..15: note = misc_feature - Xaa can be any naturally occurring amino acid
XXXXQQXXPLQQXXX

SEQ ID NO: 595 - protein, 9 aa, synthetic construct
  REGION 1..9: note = epitope
QQPLPLQQI

SEQ ID NO: 596 - protein, 7 aa, synthetic construct
  REGION 1..7: note = epitope
QPLPLQQ

SEQ ID NO: 597 - protein, 7 aa, synthetic construct
  REGION 1..7: note = epitope
  REGION 2..3: note = misc_feature - Xaa can be any naturally occurring amino acid
QXXPLQQ

SEQ ID NO: 598 - protein, 7 aa, synthetic construct
  REGION 1..7: note = epitope
  REGION 2..3: note = misc_feature - Xaa can be any naturally occurring amino acid
  SITE 7: note = misc_feature - Xaa can be any naturally occurring amino acid
QXXPLQX

SEQ ID NO: 599 - protein, 15 aa, synthetic construct
  REGION 1..15: note = epitope
  SITE 2: note = misc_feature - Xaa can be any naturally occurring amino acid
  REGION 7..15: note = misc_feature - Xaa can be any naturally occurring amino acid
KXSQQQXXXXXXXXX

SEQ ID NO: 600 - protein, 6 aa, synthetic construct
  REGION 1..6: note = epitope
KPSQQQ

SEQ ID NO: 601 - protein, 4 aa, synthetic construct
  REGION 1..4: note = epitope
SQQQ

SEQ ID NO: 602 - protein, 15 aa, synthetic construct
  REGION 1..15: note = epitope
  SITE 4: note = misc_feature - Xaa can be any naturally occurring amino acid
  REGION 13..15: note = misc_feature - Xaa can be any naturally occurring amino acid
KPSXQQPLPLQQXXX

SEQ ID NO: 603 - protein, 15 aa, synthetic construct
  REGION 1..15: note = epitope
  REGION 1..5: note = misc_feature - Xaa can be any naturally occurring amino acid
  REGION 13..15: note = misc_feature - Xaa can be any naturally occurring amino acid
XXXXXQPLPLQQXXX

SEQ ID NO: 604 - protein, 7 aa, synthetic construct
  REGION 1..7: note = epitope
QPLPLQQ

SEQ ID NO: 605 - protein, 7 aa, synthetic construct
  REGION 1..7: note = epitope
  SITE 3: note = misc_feature - Xaa can be any naturally occurring amino acid
QPXPLQQ

SEQ ID NO: 606 - protein, 15 aa, synthetic construct
  REGION 1..15: note = epitope
  REGION 1..2: note = misc_feature - Xaa can be any naturally occurring amino acid
  SITE 8: note = misc_feature - Xaa can be any naturally occurring amino acid
  REGION 14..15: note = misc_feature - Xaa can be any naturally occurring amino acid
XXSQQQPXPLQQIXX

SEQ ID NO: 607 - protein, 15 aa, synthetic construct
  REGION 1..15: note = epitope
  REGION 1..3: note = misc_feature - Xaa can be any naturally occurring amino acid
  REGION 7..8: note = misc_feature - Xaa can be any naturally occurring amino acid
  REGION 13..15: note = misc_feature - Xaa can be any naturally occurring amino acid
XXXQQQXXPLQQXXX

SEQ ID NO: 608 - protein, 7 aa, synthetic construct
  REGION 1..7: note = epitope
QPLPLQQ

SEQ ID NO: 609 - protein, 7 aa, synthetic construct
  REGION 1..7: note = epitope
  SITE 3: note = misc_feature - Xaa can be any naturally occurring amino acid
QPXPLQQ

SEQ ID NO: 610 - protein, 7 aa, synthetic construct
  REGION 1..7: note = epitope
  REGION 2..3: note = misc_feature - Xaa can be any naturally occurring amino acid
QXXPLQQ

SEQ ID NO: 611 - protein, 4 aa, synthetic construct
  REGION 1..4: note = epitope
PLQQ

SEQ ID NO: 612 - protein, 15 aa, synthetic construct
  REGION 1..15: note = epitope
  SITE 1: note = misc_feature - Xaa can be any naturally occurring amino acid
  SITE 3: note = misc_feature - Xaa can be any naturally occurring amino acid
  SITE 5: note = misc_feature - Xaa can be any naturally occurring amino acid
  SITE 15: note = misc_feature - Xaa can be any naturally occurring amino acid
XPXQXQPLPLQQILX

SEQ ID NO: 613 - protein, 15 aa, synthetic construct
  REGION 1..15: note = epitope
  REGION 1..5: note = misc_feature - Xaa can be any naturally occurring amino acid
  SITE 15: note = misc_feature - Xaa can be any naturally occurring amino acid
XXXXXQPLPLQQILX

SEQ ID NO: 614 - protein, 15 aa, synthetic construct
  REGION 1..15: note = epitope
  REGION 1..5: note = misc_feature - Xaa can be any naturally occurring amino acid
  REGION 14..15: note = misc_feature - Xaa can be any naturally occurring amino acid
XXXXXQPLPLQQIXX

SEQ ID NO: 615 - protein, 8 aa, synthetic construct
  REGION 1..8: note = epitope
KPSQQQPL

SEQ ID NO: 616 - protein, 6 aa, synthetic construct
  REGION 1..6: note = epitope
KPSQQQ

SEQ ID NO: 617 - protein, 8 aa, synthetic construct
  REGION 1..8: note = epitope
QQPLPLQQ

SEQ ID NO: 618 - protein, 8 aa, synthetic construct
  REGION 1..8: note = epitope
  SITE 1: note = misc_feature - Xaa can be any naturally occurring amino acid
XQPLPLQQ

SEQ ID NO: 619 - protein, 15 aa, synthetic construct
  REGION 1..15: note = epitope
  REGION 1..2: note = misc_feature - Xaa can be any naturally occurring amino acid
  SITE 8: note = misc_feature - Xaa can be any naturally occurring amino acid
  REGION 14..15: note = misc_feature - Xaa can be any naturally occurring amino acid
XXSQQQPXPLQQIXX

SEQ ID NO: 620 - protein, 15 aa, synthetic construct
  REGION 1..15: note = epitope
  REGION 1..5: note = misc_feature - Xaa can be any naturally occurring amino acid
  SITE 8: note = misc_feature - Xaa can be any naturally occurring amino acid
  REGION 13..15: note = misc_feature - Xaa can be any naturally occurring amino acid
XXXXXQPXPLQQXXX

SEQ ID NO: 621 - protein, 8 aa, synthetic construct
  REGION 1..8: note = epitope
QPLPLQQI

SEQ ID NO: 622 - protein, 7 aa, synthetic construct
  REGION 1..7: note = epitope
QPLPLQQ

SEQ ID NO: 623 - protein, 7 aa, synthetic construct
  REGION 1..7: note = epitope
  SITE 3: note = misc_feature - Xaa can be any naturally occurring amino acid
QPXPLQQ

SEQ ID NO: 624 - protein, 7 aa, synthetic construct
  REGION 1..7: note = epitope
  SITE 3: note = misc_feature - Xaa can be any naturally occurring amino acid
QPXPLQQ

SEQ ID NO: 625 - protein, 7 aa, synthetic construct
  REGION 1..7: note = epitope
  REGION 2..3: note = misc_feature - Xaa can be any naturally occurring amino acid
QXXPLQQ

SEQ ID NO: 626 - protein, 15 aa, synthetic construct
  REGION 1..15: note = epitope
  REGION 1..4: note = misc_feature - Xaa can be any naturally occurring amino acid
  REGION 13..15: note = misc_feature - Xaa can be any naturally occurring amino acid
XXXXQQPLPLQQXXX

SEQ ID NO: 627 - protein, 15 aa, synthetic construct
  REGION 1..15: note = epitope
  REGION 1..5: note = misc_feature - Xaa can be any naturally occurring amino acid
  SITE 7: note = misc_feature - Xaa can be any naturally occurring amino acid
  REGION 13..15: note = misc_feature - Xaa can be any naturally occurring amino acid
XXXXXQXLPLQQXXX

SEQ ID NO: 628 - protein, 15 aa, synthetic construct
  REGION 1..15: note = epitope
  REGION 1..5: note = misc_feature - Xaa can be any naturally occurring amino acid
  REGION 7..9: note = misc_feature - Xaa can be any naturally occurring amino acid
  REGION 13..15: note = misc_feature - Xaa can be any naturally occurring amino acid
XXXXXQXXXLQQXXX

SEQ ID NO: 629 - protein, 4 aa, synthetic construct
  REGION 1..4: note = epitope
PLQQ

SEQ ID NO: 630 - protein, 15 aa, synthetic construct
  REGION 1..15: note = epitope
  REGION 1..5: note = misc_feature - Xaa can be any naturally occurring amino acid
  REGION 7..9: note = misc_feature - Xaa can be any naturally occurring amino acid
  REGION 13..15: note = misc_feature - Xaa can be any naturally occurring amino acid
XXXXXQXXXLQQXXX

SEQ ID NO: 631 - protein, 7 aa, synthetic construct
  REGION 1..7: note = epitope
QPLPLQQ

SEQ ID NO: 632 - protein, 9 aa, synthetic construct
  REGION 1..9: note = epitope
KPSQQQPLP

SEQ ID NO: 633 - protein, 4 aa, synthetic construct
  REGION 1..4: note = epitope
SQQQ

SEQ ID NO: 634 - protein, 5 aa, synthetic construct
  REGION 1..5: note = epitope
LQQIL

SEQ ID NO: 635 - protein, 15 aa, synthetic construct
  REGION 1..15: note = epitope
  REGION 2..4: note = misc_feature - Xaa can be any naturally occurring amino acid
  REGION 7..8: note = misc_feature - Xaa can be any naturally occurring amino acid
  REGION 13..15: note = misc_feature - Xaa can be any naturally occurring amino acid
KXXXQQXXPLQQXXX

SEQ ID NO: 636 - protein, 15 aa, synthetic construct
  REGION 1..15: note = epitope
  REGION 1..5: note = misc_feature - Xaa can be any naturally occurring amino acid
  REGION 7..9: note = misc_feature - Xaa can be any naturally occurring amino acid
  REGION 13..15: note = misc_feature - Xaa can be any naturally occurring amino acid
XXXXXQXXXLQQXXX

SEQ ID NO: 637 - protein, 6 aa, synthetic construct
  REGION 1..6: note = epitope
KPSQQQ

SEQ ID NO: 638 - protein, 5 aa, synthetic construct
  REGION 1..5: note = epitope
PLQQI

SEQ ID NO: 639 - protein, 4 aa, synthetic construct
  REGION 1..4: note = epitope
LQQI

SEQ ID NO: 640 - protein, 15 aa, synthetic construct
  REGION 1..15: note = epitope
QVPLVQQQQFPGQQQ

SEQ ID NO: 641 - protein, 4 aa, synthetic construct
  REGION 1..4: note = epitope
PLVQ

SEQ ID NO: 642 - protein, 9 aa, synthetic construct
  REGION 1..9: note = epitope
QQQFPGQQQ

SEQ ID NO: 643 - protein, 7 aa, synthetic construct
  REGION 1..7: note = epitope
QVPLVQQ

SEQ ID NO: 644 - protein, 6 aa, synthetic construct
  REGION 1..6: note = epitope
QVPLVQ

SEQ ID NO: 645 - protein, 7 aa, synthetic construct
  REGION 1..7: note = epitope
  REGION 2..3: note = misc_feature - Xaa can be any naturally occurring amino acid
  SITE 5: note = misc_feature - Xaa can be any naturally occurring amino acid
QXXLXQQ

SEQ ID NO: 646 - protein, 15 aa, synthetic construct
  REGION 1..15: note = epitope
  REGION 2..4: note = misc_feature - Xaa can be any naturally occurring amino acid
  REGION 8..15: note = misc_feature - Xaa can be any naturally occurring amino acid
QXXXVQQXXXXXXXX

SEQ ID NO: 647 - protein, 9 aa, synthetic construct
  REGION 1..9: note = epitope
QEQVPLVQQ

SEQ ID NO: 648 - protein, 7 aa, synthetic construct
  REGION 1..7: note = epitope
EQVPLVQ

SEQ ID NO: 649 - protein, 7 aa, synthetic construct
  REGION 1..7: note = epitope
  REGION 3..5: note = misc_feature - Xaa can be any naturally occurring amino acid
EQXXXVQ

SEQ ID NO: 650 - protein, 6 aa, synthetic construct
  REGION 1..6: note = epitope
QVPLVQ

SEQ ID NO: 651 - protein, 9 aa, synthetic construct
  REGION 1..9: note = epitope
QQQFPGQQQ

SEQ ID NO: 652 - protein, 15 aa, synthetic construct
  REGION 1..15: note = epitope
  REGION 2..3: note = misc_feature - Xaa can be any naturally occurring amino acid
  REGION 8..15: note = misc_feature - Xaa can be any naturally occurring amino acid
QXXLVQQXXXXXXXX

SEQ ID NO: 653 - protein, 7 aa, synthetic construct
  REGION 1..7: note = epitope
QVPLVQQ

SEQ ID NO: 654 - protein, 5 aa, synthetic construct
  REGION 1..5: note = epitope
PLVQQ

SEQ ID NO: 655 - protein, 5 aa, synthetic construct
  REGION 1..5: note = epitope
  SITE 1: note = misc_feature - Xaa can be any naturally occurring amino acid
XLVQQ

SEQ ID NO: 656 - protein, 10 aa, synthetic construct
  REGION 1..10: note = epitope
QQQQFPGQQQ

SEQ ID NO: 657 - protein, 8 aa, synthetic construct
  REGION 1..8: note = epitope
QQFPGQQQ

SEQ ID NO: 658 - protein, 15 aa, synthetic construct
  REGION 1..15: note = epitope
  REGION 2..4: note = misc_feature - Xaa can be any naturally occurring amino acid
  REGION 8..15: note = misc_feature - Xaa can be any naturally occurring amino acid
QXXXVQQXXXXXXXX

SEQ ID NO: 659 - protein, 7 aa, synthetic construct
  REGION 1..7: note = epitope
QVPLVQQ

SEQ ID NO: 660 - protein, 7 aa, synthetic construct
  REGION 1..7: note = epitope
  REGION 2..4: note = misc_feature - Xaa can be any naturally occurring amino acid
QXXXVQQ

SEQ ID NO: 661 - protein, 6 aa, synthetic construct
  REGION 1..6: note = epitope
QVPLVQ

SEQ ID NO: 662 - protein, 5 aa, synthetic construct
  REGION 1..5: note = epitope
VPLVQ

SEQ ID NO: 663 - protein, 8 aa, synthetic construct
  REGION 1..8: note = epitope
QQFPGQQQ

SEQ ID NO: 664 - protein, 10 aa, synthetic construct
  REGION 1..10: note = epitope
QQQQFPGQQQ

SEQ ID NO: 665 - protein, 9 aa, synthetic construct
  REGION 1..9: note = epitope
QQQFPGQQQ

SEQ ID NO: 666 - protein, 7 aa, synthetic construct
  REGION 1..7: note = epitope
QQFPGQQ

SEQ ID NO: 667 - protein, 7 aa, synthetic construct
  REGION 1..7: note = epitope
FPGQQQP

SEQ ID NO: 668 - protein, 6 aa, synthetic construct
  REGION 1..6: note = epitope
FPGQQQ

SEQ ID NO: 669 - protein, 15 aa, synthetic construct
  REGION 1..15: note = epitope
  REGION 1..5: note = misc_feature - Xaa can be any naturally occurring amino acid
  REGION 9..13: note = misc_feature - Xaa can be any naturally occurring amino acid
XXXXXQQQXXXXXQQ

SEQ ID NO: 670 - protein, 10 aa, synthetic construct
  REGION 1..10: note = epitope
QEQVPLVQQQ

SEQ ID NO: 671 - protein, 9 aa, synthetic construct
  REGION 1..9: note = epitope
EQVPLVQQQ

SEQ ID NO: 672 - protein, 9 aa, synthetic construct
  REGION 1..9: note = epitope
  REGION 2..6: note = misc_feature - Xaa can be any naturally occurring amino acid
EXXXXXQQQ

SEQ ID NO: 673 - protein, 9 aa, synthetic construct
  REGION 1..9: note = epitope
PLVQQQQFP

SEQ ID NO: 674 - protein, 4 aa, synthetic construct
  REGION 1..4: note = epitope
LVQQ

SEQ ID NO: 675 - protein, 8 aa, synthetic construct
  REGION 1..8: note = epitope
QQFPGQQQ

SEQ ID NO: 676 - protein, 7 aa, synthetic construct
  REGION 1..7: note = epitope
QFPGQQQ

SEQ ID NO: 677 - protein, 7 aa, synthetic construct
  REGION 1..7: note = epitope
QVPLVQQ

SEQ ID NO: 678 - protein, 6 aa, synthetic construct
  REGION 1..6: note = epitope
QVPLVQ

SEQ ID NO: 679 - protein, 8 aa, synthetic construct
  REGION 1..8: note = epitope
QQFPGQQQ

SEQ ID NO: 680 - protein, 4 aa, synthetic construct
  REGION 1..4: note = epitope
FPGQ

SEQ ID NO: 681 - protein, 15 aa, synthetic construct
  REGION 1..15: note = epitope
  SITE 2: note = misc_feature - Xaa can be any naturally occurring amino acid
  SITE 4: note = misc_feature - Xaa can be any naturally occurring amino acid
  SITE 12: note = misc_feature - Xaa can be any naturally occurring amino acid
QXPXVQQQQFPXQQQ

SEQ ID NO: 682 - protein, 15 aa, synthetic construct
  REGION 1..15: note = epitope
  SITE 2: note = misc_feature - Xaa can be any naturally occurring amino acid
  SITE 4: note = misc_feature - Xaa can be any naturally occurring amino acid
  REGION 8..13: note = misc_feature - Xaa can be any naturally occurring amino acid
QXPXVQQXXXXXXQQ

SEQ ID NO: 683 - protein, 7 aa, synthetic construct
  REGION 1..7: note = epitope
QFPGQQQ

SEQ ID NO: 684 - protein, 7 aa, synthetic construct
  REGION 1..7: note = epitope
  SITE 4: note = misc_feature - Xaa can be any naturally occurring amino acid
QFPXQQQ

SEQ ID NO: 685 - protein, 6 aa, synthetic construct
  REGION 1..6: note = epitope
QVPLVQ

SEQ ID NO: 686 - protein, 5 aa, synthetic construct
  REGION 1..5: note = epitope
FPGQQ

SEQ ID NO: 687 - protein, 15 aa, synthetic construct
  REGION 1..15: note = epitope
  REGION 1..5: note = misc_feature - Xaa can be any naturally occurring amino acid
  SITE 7: note = misc_feature - Xaa can be any naturally occurring amino acid
  REGION 9..10: note = misc_feature - Xaa can be any naturally occurring amino acid
  SITE 12: note = misc_feature - Xaa can be any naturally occurring amino acid
  SITE 14: note = misc_feature - Xaa can be any naturally occurring amino acid
XXXXXQXQXXPXQXQ

SEQ ID NO: 688 - protein, 10 aa, synthetic construct
  REGION 1..10: note = epitope
PLVQQQQFPG

SEQ ID NO: 689 - protein, 8 aa, synthetic construct
  REGION 1..8: note = epitope
QQFPGQQQ

SEQ ID NO: 690 - protein, 8 aa, synthetic construct
  REGION 1..8: note = epitope
  REGION 2..3: note = misc_feature - Xaa can be any naturally occurring amino acid
  SITE 5: note = misc_feature - Xaa can be any naturally occurring amino acid
  SITE 7: note = misc_feature - Xaa can be any naturally occurring amino acid
QXXPXQXQ

SEQ ID NO: 691 - protein, 15 aa, synthetic construct
  REGION 1..15: note = epitope
  REGION 1..2: note = misc_feature - Xaa can be any naturally occurring amino acid
  REGION 4..8: note = misc_feature - Xaa can be any naturally occurring amino acid
  REGION 10..12: note = misc_feature - Xaa can be any naturally occurring amino acid
XXPXXXXXQXXXQQQ

SEQ ID NO: 692 - protein, 10 aa, synthetic construct
  REGION 1..10: note = epitope
QQQQFPGQQQ

SEQ ID NO: 693 - protein, 8 aa, synthetic construct
  REGION 1..8: note = epitope
QQQFPGQQ

SEQ ID NO: 694 - protein, 5 aa, synthetic construct
  REGION 1..5: note = epitope
VPLVQ

SEQ ID NO: 695 - protein, 5 aa, synthetic construct
  REGION 1..5: note = epitope
FPGQQ

SEQ ID NO: 696 - protein, 4 aa, synthetic construct
  REGION 1..4: note = epitope
PLVQ

SEQ ID NO: 697 - protein, 9 aa, synthetic construct
  REGION 1..9: note = epitope
QQQFPGQQQ

SEQ ID NO: 698 - protein, 9 aa, synthetic construct
  REGION 1..9: note = epitope
FPGQQQPFP

SEQ ID NO: 699 - protein, 8 aa, synthetic construct
  REGION 1..8: note = epitope
FPGQQQPF

SEQ ID NO: 700 - protein, 6 aa, synthetic construct
  REGION 1..6: note = epitope
FPGQQQ

SEQ ID NO: 701 - protein, 8 aa, synthetic construct
  REGION 1..8: note = epitope
PLVQQQQF

SEQ ID NO: 702 - protein, 5 aa, synthetic construct
  REGION 1..5: note = epitope
PLVQQ

SEQ ID NO: 703 - protein, 6 aa, synthetic construct
  REGION 1..6: note = epitope
FPGQQQ

SEQ ID NO: 704 - protein, 9 aa, synthetic construct
  REGION 1..9: note = epitope
PLVQQQQFP

SEQ ID NO: 705 - protein, 8 aa, synthetic construct
  REGION 1..8: note = epitope
QQQFPGQQ

SEQ ID NO: 706 - protein, 15 aa, synthetic construct
  REGION 1..15: note = epitope
VILFEETLYQSTKGG

SEQ ID NO: 707 - protein, 15 aa, synthetic construct
  REGION 1..15: note = epitope
  REGION 1..8: note = misc_feature - Xaa can be any naturally occurring amino acid
  REGION 10..11: note = misc_feature - Xaa can be any naturally occurring amino acid
  SITE 14: note = misc_feature - Xaa can be any naturally occurring amino acid
XXXXXXXXYXXTKXG

SEQ ID NO: 708 - protein, 6 aa, synthetic construct
  REGION 1..6: note = epitope
QSTKGG

SEQ ID NO: 709 - protein, 5 aa, synthetic construct
  REGION 1..5: note = epitope
QSTKG

SEQ ID NO: 710 - protein, 6 aa, synthetic construct
  REGION 1..6: note = epitope
QSTKGG

SEQ ID NO: 711 - protein, 5 aa, synthetic construct
  REGION 1..5: note = epitope
QSTKG

SEQ ID NO: 712 - protein, 10 aa, synthetic construct
  REGION 1..10: note = epitope
ILFEETLYQS

SEQ ID NO: 713 - protein, 6 aa, synthetic construct
  REGION 1..6: note = epitope
QSTKGG

SEQ ID NO: 714 - protein, 5 aa, synthetic construct
  REGION 1..5: note = epitope
QSTKG

SEQ ID NO: 715 - protein, 15 aa, synthetic construct
  REGION 1..15: note = epitope
  REGION 1..8: note = misc_feature - Xaa can be any naturally occurring amino acid
  SITE 10: note = misc_feature - Xaa can be any naturally occurring amino acid
XXXXXXXXYXSTKGG

SEQ ID NO: 716 - protein, 4 aa, synthetic construct
  REGION 1..4: note = epitope
QSTK

SEQ ID NO: 717 - protein, 6 aa, synthetic construct
  REGION 1..6: note = epitope
QSTKGG

SEQ ID NO: 718 - protein, 5 aa, synthetic construct
  REGION 1..5: note = epitope
QSTKG

SEQ ID NO: 719 - protein, 15 aa, synthetic construct
  REGION 1..15: note = epitope
  REGION 1..8: note = misc_feature - Xaa can be any naturally occurring amino acid
  SITE 10: note = misc_feature - Xaa can be any naturally occurring amino acid
  SITE 12: note = misc_feature - Xaa can be any naturally occurring amino acid
  SITE 14: note = misc_feature - Xaa can be any naturally occurring amino acid
XXXXXXXXYXSXKXG

SEQ ID NO: 720 - protein, 6 aa, synthetic construct
  REGION 1..6: note = epitope
QSTKGG

SEQ ID NO: 721 - protein, 6 aa, synthetic construct
  REGION 1..6: note = epitope
QSTKGG

SEQ ID NO: 722 - protein, 4 aa, synthetic construct
  REGION 1..4: note = epitope
QSTK

SEQ ID NO: 723 - protein, 4 aa, synthetic construct
  REGION 1..4: note = epitope
QSTK

SEQ ID NO: 724 - protein, 8 aa, synthetic construct
  REGION 1..8: note = epitope
ILFEETLY

SEQ ID NO: 725 - protein, 5 aa, synthetic construct
  REGION 1..5: note = epitope
QSTKG

SEQ ID NO: 726 - protein, 10 aa, synthetic construct
  REGION 1..10: note = epitope
ILFEETLYQS

SEQ ID NO: 727 - protein, 6 aa, synthetic construct
  REGION 1..6: note = epitope
QSTKGG

SEQ ID NO: 728 - protein, 5 aa, synthetic construct
  REGION 1..5: note = epitope
QSTKG

SEQ ID NO: 729 - protein, 4 aa, synthetic construct
  REGION 1..4: note = epitope
QSTK

SEQ ID NO: 730 - protein, 15 aa, synthetic construct
  REGION 1..15: note = epitope
  REGION 1..8: note = misc_feature - Xaa can be any naturally occurring amino acid
XXXXXXXXYQSTKGG

SEQ ID NO: 731 - protein, 15 aa, synthetic construct
  REGION 1..15: note = epitope
  REGION 1..8: note = misc_feature - Xaa can be any naturally occurring amino acid
  SITE 10: note = misc_feature - Xaa can be any naturally occurring amino acid
  SITE 12: note = misc_feature - Xaa can be any naturally occurring amino acid
XXXXXXXXYXSXKGG

SEQ ID NO: 732 - protein, 9 aa, synthetic construct
  REGION 1..9: note = epitope
VILFEETLY

SEQ ID NO: 733 - protein, 6 aa, synthetic construct
  REGION 1..6: note = epitope
QSTKGG

SEQ ID NO: 734 - protein, 5 aa, synthetic construct
  REGION 1..5: note = epitope
QSTKG

SEQ ID NO: 735 - protein, 9 aa, synthetic construct
  REGION 1..9: note = epitope
VILFEETLY

SEQ ID NO: 736 - protein, 8 aa, synthetic construct
  REGION 1..8: note = epitope
ILFEETLY

SEQ ID NO: 737 - protein, 6 aa, synthetic construct
  REGION 1..6: note = epitope
QSTKGG

SEQ ID NO: 738 - protein, 5 aa, synthetic construct
  REGION 1..5: note = epitope
QSTKG

SEQ ID NO: 739 - protein, 4 aa, synthetic construct
  REGION 1..4: note = epitope
QSTK

SEQ ID NO: 740 - protein, 15 aa, synthetic construct
  REGION 1..15: note = epitope
  REGION 1..7: note = misc_feature - Xaa can be any naturally occurring amino acid
  SITE 10: note = misc_feature - Xaa can be any naturally occurring amino acid
XXXXXXXLYXSTKGG

SEQ ID NO: 741 - protein, 15 aa, synthetic construct
  REGION 1..15: note = epitope
  REGION 1..8: note = misc_feature - Xaa can be any naturally occurring amino acid
  REGION 10..11: note = misc_feature - Xaa can be any naturally occurring amino acid
XXXXXXXXYXXTKGG

SEQ ID NO: 742 - protein, 6 aa, synthetic construct
  REGION 1..6: note = epitope
QSTKGG

SEQ ID NO: 743 - protein, 6 aa, synthetic construct
  REGION 1..6: note = epitope
  SITE 1: note = misc_feature - Xaa can be any naturally occurring amino acid
XSTKGG

SEQ ID NO: 744 - protein, 6 aa, synthetic construct
  REGION 1..6: note = epitope
  REGION 1..2: note = misc_feature - Xaa can be any naturally occurring amino acid
XXTKGG

SEQ ID NO: 745 - protein, 4 aa, synthetic construct
  REGION 1..4: note = epitope
QSTK

SEQ ID NO: 746 - protein, 5 aa, synthetic construct
  REGION 1..5: note = epitope
QSTKG

SEQ ID NO: 747 - protein, 4 aa, synthetic construct
  REGION 1..4: note = epitope
QSTK

SEQ ID NO: 748 - protein, 6 aa, synthetic construct
  REGION 1..6: note = epitope
QSTKGG

SEQ ID NO: 749 - protein, 5 aa, synthetic construct
  REGION 1..5: note = epitope
QSTKG

SEQ ID NO: 750 - protein, 6 aa, synthetic construct
  REGION 1..6: note = epitope
QSTKGG

SEQ ID NO: 751 - protein, 5 aa, synthetic construct
  REGION 1..5: note = epitope
QSTKG

SEQ ID NO: 752 - protein, 6 aa, synthetic construct
  REGION 1..6: note = epitope
QSTKGG

SEQ ID NO: 753 - protein, 5 aa, synthetic construct
  REGION 1..5: note = epitope
QSTKG

SEQ ID NO: 754 - protein, 15 aa, synthetic construct
  REGION 1..15: note = epitope
  REGION 1..8: note = misc_feature - Xaa can be any naturally occurring amino acid
  SITE 10: note = misc_feature - Xaa can be any naturally occurring amino acid
  SITE 12: note = misc_feature - Xaa can be any naturally occurring amino acid
  SITE 15: note = misc_feature - Xaa can be any naturally occurring amino acid
XXXXXXXXYXSXKGX

SEQ ID NO: 755 - protein, 10 aa, synthetic construct
  REGION 1..10: note = epitope
ILFEETLYQS

SEQ ID NO: 756 - protein, 7 aa, synthetic construct
  REGION 1..7: note = epitope
QSTKGGK

SEQ ID NO: 757 - protein, 6 aa, synthetic construct
  REGION 1..6: note = epitope
QSTKGG

SEQ ID NO: 758 - protein, 10 aa, synthetic construct
  REGION 1..10: note = epitope
VILFEETLYQ

SEQ ID NO: 759 - protein, 6 aa, synthetic construct
  REGION 1..6: note = epitope
QSTKGG

SEQ ID NO: 760 - protein, 5 aa, synthetic construct
  REGION 1..5: note = epitope
QSTKG

SEQ ID NO: 761 - protein, 15 aa, synthetic construct
  REGION 1..15: note = epitope
  SITE 1: note = misc_feature - Xaa can be any naturally occurring amino acid
  SITE 3: note = misc_feature - Xaa can be any naturally occurring amino acid
  REGION 5..8: note = misc_feature - Xaa can be any naturally occurring amino acid
  SITE 10: note = misc_feature - Xaa can be any naturally occurring amino acid
XIXFXXXXYXSTKGG

SEQ ID NO: 762 - protein, 6 aa, synthetic construct
  REGION 1..6: note = epitope
QSTKGG

SEQ ID NO: 763 - protein, 6 aa, synthetic construct
  REGION 1..6: note = epitope
  SITE 1: note = misc_feature - Xaa can be any naturally occurring amino acid
XSTKGG

SEQ ID NO: 764 - protein, 5 aa, synthetic construct
  REGION 1..5: note = epitope
QSTKG

SEQ ID NO: 765 - protein, 6 aa, synthetic construct
  REGION 1..6: note = epitope
QSTKGG

SEQ ID NO: 766 - protein, 15 aa, synthetic construct
  REGION 1..15: note = epitope
  REGION 1..8: note = misc_feature - Xaa can be any naturally occurring amino acid
  REGION 10..11: note = misc_feature - Xaa can be any naturally occurring amino acid
  SITE 14: note = misc_feature - Xaa can be any naturally occurring amino acid
XXXXXXXXYXXTKXG

SEQ ID NO: 767 - protein, 6 aa, synthetic construct
  REGION 1..6: note = epitope
QSTKGG

SEQ ID NO: 768 - protein, 5 aa, synthetic construct
  REGION 1..5: note = epitope
QSTKG

SEQ ID NO: 769 - protein, 15 aa, synthetic construct
  REGION 1..15: note = epitope
  REGION 1..7: note = misc_feature - Xaa can be any naturally occurring amino acid
XXXXXXXLYQSTKGG

SEQ ID NO: 770 - protein, 5 aa, synthetic construct
  REGION 1..5: note = epitope
QSTKG

SEQ ID NO: 771 - protein, 4 aa, synthetic construct
  REGION 1..4: note = epitope
QSTK

SEQ ID NO: 772 - protein, 15 aa, synthetic construct
  REGION 1..15: note = epitope
  REGION 1..8: note = misc_feature - Xaa can be any naturally occurring amino acid
  REGION 10..11: note = misc_feature - Xaa can be any naturally occurring amino acid
XXXXXXXXYXXTKGG

SEQ ID NO: 773 - protein, 10 aa, synthetic construct
  REGION 1..10: note = epitope
VILFEETLYQ

SEQ ID NO: 774 - protein, 5 aa, synthetic construct
  REGION 1..5: note = epitope
QSTKG

SEQ ID NO: 775 - protein, 4 aa, synthetic construct
  REGION 1..4: note = epitope
QSTK

SEQ ID NO: 776 - protein, 15 aa, synthetic construct
  REGION 1..15: note = epitope
QPYPQPQPFPSQQPY

SEQ ID NO: 777 - protein, 15 aa, synthetic construct
  REGION 1..15: note = epitope
  REGION 1..4: note = misc_feature - Xaa can be any naturally occurring amino acid
  REGION 14..15: note = misc_feature - Xaa can be any naturally occurring amino acid
XXXXQPQPFPSQQXX

SEQ ID NO: 778 - protein, 15 aa, synthetic construct
  REGION 1..15: note = epitope
  REGION 1..7: note = misc_feature - Xaa can be any naturally occurring amino acid
  SITE 11: note = misc_feature - Xaa can be any naturally occurring amino acid
  REGION 13..15: note = misc_feature - Xaa can be any naturally occurring amino acid
XXXXXXXPFPXQXXX

SEQ ID NO: 779 - protein, 7 aa, synthetic construct
  REGION 1..7: note = epitope
PQPQPFP

SEQ ID NO: 780 - protein, 15 aa, synthetic construct
  REGION 1..15: note = epitope
  REGION 4..7: note = misc_feature - Xaa can be any naturally occurring amino acid
  SITE 9: note = misc_feature - Xaa can be any naturally occurring amino acid
  SITE 13: note = misc_feature - Xaa can be any naturally occurring amino acid
QPYXXXXPXPSQXPY

SEQ ID NO: 781 - protein, 15 aa, synthetic construct
  REGION 1..15: note = epitope
  SITE 1: note = misc_feature - Xaa can be any naturally occurring amino acid
  REGION 4..9: note = misc_feature - Xaa can be any naturally occurring amino acid
  SITE 11: note = misc_feature - Xaa can be any naturally occurring amino acid
  REGION 13..14: note = misc_feature - Xaa can be any naturally occurring amino acid
XPYXXXXXXPXQXXY

SEQ ID NO: 782 - protein, 9 aa, synthetic construct
  REGION 1..9: note = epitope
PQPQPFPSQ

SEQ ID NO: 783 - protein, 9 aa, synthetic construct
  REGION 1..9: note = epitope
  REGION 1..4: note = misc_feature - Xaa can be any naturally occurring amino acid
  SITE 6: note = misc_feature - Xaa can be any naturally occurring amino acid
XXXXPXPSQ

SEQ ID NO: 784 - protein, 7 aa, synthetic construct
  REGION 1..7: note = epitope
PQPQPFP

SEQ ID NO: 785 - protein, 4 aa, synthetic construct
  REGION 1..4: note = epitope
QPFP

SEQ ID NO: 786 - protein, 15 aa, synthetic construct
  REGION 1..15: note = epitope
  SITE 1: note = misc_feature - Xaa can be any naturally occurring amino acid
  SITE 4: note = misc_feature - Xaa can be any naturally occurring amino acid
  SITE 7: note = misc_feature - Xaa can be any naturally occurring amino acid
  REGION 12..15: note = misc_feature - Xaa can be any naturally occurring amino acid
XPYXQPXPFPSXXXX

SEQ ID NO: 787 - protein, 15 aa, synthetic construct
  REGION 1..15: note = epitope
  REGION 1..4: note = misc_feature - Xaa can be any naturally occurring amino acid
  REGION 7..9: note = misc_feature - Xaa can be any naturally occurring amino acid
  REGION 12..15: note = misc_feature - Xaa can be any naturally occurring amino acid
XXXXQPXXXPSXXXX

SEQ ID NO: 788 - protein, 6 aa, synthetic construct
  REGION 1..6: note = epitope
QPQPFP

SEQ ID NO: 789 - protein, 5 aa, synthetic construct
  REGION 1..5: note = epitope
QPQPF

SEQ ID NO: 790 - protein, 5 aa, synthetic construct
  REGION 1..5: note = epitope
  SITE 3: note = misc_feature - Xaa can be any naturally occurring amino acid
QPXPF

SEQ ID NO: 791 - protein, 15 aa, synthetic construct
  REGION 1..15: note = epitope
  SITE 1: note = misc_feature - Xaa can be any naturally occurring amino acid
  SITE 4: note = misc_feature - Xaa can be any naturally occurring amino acid
  REGION 7..8: note = misc_feature - Xaa can be any naturally occurring amino acid
  SITE 13: note = misc_feature - Xaa can be any naturally occurring amino acid
XPYXQPXXFPSQXPY

SEQ ID NO: 792 - protein, 15 aa, synthetic construct
  REGION 1..15: note = epitope
  REGION 1..2: note = misc_feature - Xaa can be any naturally occurring amino acid
  SITE 4: note = misc_feature - Xaa can be any naturally occurring amino acid
  REGION 6..9: note = misc_feature - Xaa can be any naturally occurring amino acid
  SITE 13: note = misc_feature - Xaa can be any naturally occurring amino acid
XXYXQXXXXPSQXPY

SEQ ID NO: 793 - protein, 10 aa, synthetic construct
  REGION 1..10: note = epitope
YPQPQPFPSQ

SEQ ID NO: 794 - protein, 9 aa, synthetic construct
  REGION 1..9: note = epitope
PQPQPFPSQ

SEQ ID NO: 795 - protein, 9 aa, synthetic construct
  REGION 1..9: note = epitope
  SITE 1: note = misc_feature - Xaa can be any naturally occurring amino acid
  REGION 4..5: note = misc_feature - Xaa can be any naturally occurring amino acid
XQPXXFPSQ

SEQ ID NO: 796 - protein, 9 aa, synthetic construct
  REGION 1..9: note = epitope
  SITE 1: note = misc_feature - Xaa can be any naturally occurring amino acid
  REGION 3..6: note = misc_feature - Xaa can be any naturally occurring amino acid
XQXXXXPSQ

SEQ ID NO: 797 - protein, 10 aa, synthetic construct
  REGION 1..10: note = epitope
PQPFPSQQPY

SEQ ID NO: 798 - protein, 10 aa, synthetic construct
  REGION 1..10: note = epitope
PFPSQQPYLQ

SEQ ID NO: 799 - protein, 7 aa, synthetic construct
  REGION 1..7: note = epitope
FPSQQPY

SEQ ID NO: 800 - protein, 7 aa, synthetic construct
  REGION 1..7: note = epitope
  SITE 5: note = misc_feature - Xaa can be any naturally occurring amino acid
FPSQXPY

SEQ ID NO: 801 - protein, 7 aa, synthetic construct
  REGION 1..7: note = epitope
  SITE 1: note = misc_feature - Xaa can be any naturally occurring amino acid
  SITE 5: note = misc_feature - Xaa can be any naturally occurring amino acid
XPSQXPY

SEQ ID NO: 802 - protein, 15 aa, synthetic construct
  REGION 1..15: note = epitope
  REGION 4..5: note = misc_feature - Xaa can be any naturally occurring amino acid
QPYXXPQPFPSQQPY

SEQ ID NO: 803 - protein, 15 aa, synthetic construct
  REGION 1..15: note = epitope
  SITE 1: note = misc_feature - Xaa can be any naturally occurring amino acid
  REGION 4..5: note = misc_feature - Xaa can be any naturally occurring amino acid
XPYXXPQPFPSQQPY

SEQ ID NO: 804 - protein, 7 aa, synthetic construct
  REGION 1..7: note = epitope
PQPQPFP

SEQ ID NO: 805 - protein, 7 aa, synthetic construct
  REGION 1..7: note = epitope
  REGION 1..2: note = misc_feature - Xaa can be any naturally occurring amino acid
XXPQPFP

SEQ ID NO: 806 - protein, 15 aa, synthetic construct
  REGION 1..15: note = epitope
  SITE 1: note = misc_feature - Xaa can be any naturally occurring amino acid
  REGION 4..8: note = misc_feature - Xaa can be any naturally occurring amino acid
  REGION 14..15: note = misc_feature - Xaa can be any naturally occurring amino acid
XPYXXXXXFPSQQXX

SEQ ID NO: 807 - protein, 15 aa, synthetic construct
  REGION 1..15: note = epitope
  REGION 1..2: note = misc_feature - Xaa can be any naturally occurring amino acid
  REGION 4..9: note = misc_feature - Xaa can be any naturally occurring amino acid
  REGION 14..15: note = misc_feature - Xaa can be any naturally occurring amino acid
XXYXXXXXXPSQQXX

SEQ ID NO: 808 - protein, 7 aa, synthetic construct
  REGION 1..7: note = epitope
PQPQPFP

SEQ ID NO: 809 - protein, 5 aa, synthetic construct
  REGION 1..5: note = epitope
QPQPF

SEQ ID NO: 810 - protein, 15 aa, synthetic construct
  REGION 1..15: note = epitope
  REGION 1..2: note = misc_feature - Xaa can be any naturally occurring amino acid
  REGION 4..6: note = misc_feature - Xaa can be any naturally occurring amino acid
  SITE 9: note = misc_feature - Xaa can be any naturally occurring amino acid
  SITE 11: note = misc_feature - Xaa can be any naturally occurring amino acid
  REGION 14..15: note = misc_feature - Xaa can be any naturally occurring amino acid
XXYXXXQPXPXQQXX

SEQ ID NO: 811 - protein, 7 aa, synthetic construct
  REGION 1..7: note = epitope
PQPQPFP

SEQ ID NO: 812 - protein, 15 aa, synthetic construct
  REGION 1..15: note = epitope
  SITE 9: note = misc_feature - Xaa can be any naturally occurring amino acid
QPYPQPQPXPSQQPY

SEQ ID NO: 813 - protein, 15 aa, synthetic construct
  REGION 1..15: note = epitope
  REGION 1..2: note = misc_feature - Xaa can be any naturally occurring amino acid
  REGION 4..6: note = misc_feature - Xaa can be any naturally occurring amino acid
  SITE 9: note = misc_feature - Xaa can be any naturally occurring amino acid
  SITE 14: note = misc_feature - Xaa can be any naturally occurring amino acid
XXYXXXQPXPSQQXY

SEQ ID NO: 814 - protein, 9 aa, synthetic construct
  REGION 1..9: note = epitope
PQPQPFPSQ

SEQ ID NO: 815 - protein, 7 aa, synthetic construct
  REGION 1..7: note = epitope
QPQPFPS

SEQ ID NO: 816 - protein, 7 aa, synthetic construct
  REGION 1..7: note = epitope
  SITE 5: note = misc_feature - Xaa can be any naturally occurring amino acid
QPQPXPS

SEQ ID NO: 817 - protein, 7 aa, synthetic construct
  REGION 1..7: note = epitope
  REGION 1..2: note = misc_feature - Xaa can be any naturally occurring amino acid
  SITE 5: note = misc_feature - Xaa can be any naturally occurring amino acid
XXQPXPS

SEQ ID NO: 818 - protein, 15 aa, synthetic construct
  REGION 1..15: note = epitope
  REGION 1..2: note = misc_feature - Xaa can be any naturally occurring amino acid
  SITE 4: note = misc_feature - Xaa can be any naturally occurring amino acid
  REGION 6..9: note = misc_feature - Xaa can be any naturally occurring amino acid
  SITE 14: note = misc_feature - Xaa can be any naturally occurring amino acid
XXYXQXXXXPSQQXY

SEQ ID NO: 819 - protein, 6 aa, synthetic construct
  REGION 1..6: note = epitope
QPFPSQ

SEQ ID NO: 820 - protein, 15 aa, synthetic construct
  REGION 1..15: note = epitope
  SITE 1: note = misc_feature - Xaa can be any naturally occurring amino acid
  SITE 4: note = misc_feature - Xaa can be any naturally occurring amino acid
  SITE 9: note = misc_feature - Xaa can be any naturally occurring amino acid
  SITE 14: note = misc_feature - Xaa can be any naturally occurring amino acid
XPYXQPQPXPSQQXY

SEQ ID NO: 821 - protein, 15 aa, synthetic construct
  REGION 1..15: note = epitope
  REGION 1..7: note = misc_feature - Xaa can be any naturally occurring amino acid
  SITE 9: note = misc_feature - Xaa can be any naturally occurring amino acid
  SITE 14: note = misc_feature - Xaa can be any naturally occurring amino acid
XXXXXXXPXPSQQXY

SEQ ID NO: 822 - protein, 10 aa, synthetic construct
  REGION 1..10: note = epitope
YPQPQPFPSQ

SEQ ID NO: 823 - protein, 9 aa, synthetic construct
  REGION 1..9: note = epitope
PQPQPFPSQ

SEQ ID NO: 824 - protein, 9 aa, synthetic construct
  REGION 1..9: note = epitope
  SITE 1: note = misc_feature - Xaa can be any naturally occurring amino acid
  SITE 6: note = misc_feature - Xaa can be any naturally occurring amino acid
XQPQPXPSQ

SEQ ID NO: 825 - protein, 9 aa, synthetic construct
  REGION 1..9: note = epitope
  REGION 1..4: note = misc_feature - Xaa can be any naturally occurring amino acid
  SITE 6: note = misc_feature - Xaa can be any naturally occurring amino acid
XXXXPXPSQ

SEQ ID NO: 826 - protein, 15 aa, synthetic construct
  REGION 1..15: note = epitope
  REGION 1..2: note = misc_feature - Xaa can be any naturally occurring amino acid
  REGION 4..9: note = misc_feature - Xaa can be any naturally occurring amino acid
  REGION 14..15: note = misc_feature - Xaa can be any naturally occurring amino acid
XXYXXXXXXPSQQXX

SEQ ID NO: 827 - protein, 8 aa, synthetic construct
  REGION 1..8: note = epitope
YPQPQPFP

SEQ ID NO: 828 - protein, 10 aa, synthetic construct
  REGION 1..10: note = epitope
QPFPSQQPYL

SEQ ID NO: 829 - protein, 10 aa, synthetic construct
  REGION 1..10: note = epitope
  REGION 1..3: note = misc_feature - Xaa can be any naturally occurring amino acid
  REGION 8..9: note = misc_feature - Xaa can be any naturally occurring amino acid
XXXPSQQXXL

SEQ ID NO: 830 - protein, 15 aa, synthetic construct
  REGION 1..15: note = epitope
  SITE 4: note = misc_feature - Xaa can be any naturally occurring amino acid
  SITE 6: note = misc_feature - Xaa can be any naturally occurring amino acid
  SITE 9: note = misc_feature - Xaa can be any naturally occurring amino acid
  REGION 14..15: note = misc_feature - Xaa can be any naturally occurring amino acid
QPYXQXQPXPSQQXX

SEQ ID NO: 831 - protein, 15 aa, synthetic construct
  REGION 1..15: note = epitope
  REGION 1..2: note = misc_feature - Xaa can be any naturally occurring amino acid
  REGION 4..6: note = misc_feature - Xaa can be any naturally occurring amino acid
  REGION 8..9: note = misc_feature - Xaa can be any naturally occurring amino acid
  REGION 14..15: note = misc_feature - Xaa can be any naturally occurring amino acid
XXYXXXQXXPSQQXX

SEQ ID NO: 832 - protein, 7 aa, synthetic construct
  REGION 1..7: note = epitope
PQPQPFP

SEQ ID NO: 833 - protein, 5 aa, synthetic construct
  REGION 1..5: note = epitope
QPQPF

SEQ ID NO: 834 - protein, 15 aa, synthetic construct
  REGION 1..15: note = epitope
  SITE 1: note = misc_feature - Xaa can be any naturally occurring amino acid
  REGION 3..4: note = misc_feature - Xaa can be any naturally occurring amino acid
  SITE 8: note = misc_feature - Xaa can be any naturally occurring amino acid
  SITE 11: note = misc_feature - Xaa can be any naturally occurring amino acid
  REGION 14..15: note = misc_feature - Xaa can be any naturally occurring amino acid
XPXXQPQXFPXQQXX

SEQ ID NO: 835 - protein, 15 aa, synthetic construct
  REGION 1..15: note = epitope
  SITE 1: note = misc_feature - Xaa can be any naturally occurring amino acid
  REGION 4..5: note = misc_feature - Xaa can be any naturally occurring amino acid
  REGION 13..15: note = misc_feature - Xaa can be any naturally occurring amino acid
XPYXXPQPFPSQXXX

SEQ ID NO: 836 - protein, 15 aa, synthetic construct
  REGION 1..15: note = epitope
  REGION 1..2: note = misc_feature - Xaa can be any naturally occurring amino acid
  REGION 4..6: note = misc_feature - Xaa can be any naturally occurring amino acid
  SITE 9: note = misc_feature - Xaa can be any naturally occurring amino acid
  REGION 12..15: note = misc_feature - Xaa can be any naturally occurring amino acid
XXYXXXQPXPSXXXX

SEQ ID NO: 837 - protein, 8 aa, synthetic construct
  REGION 1..8: note = epitope
PQPQPFPS

SEQ ID NO: 838 - protein, 7 aa, synthetic construct
  REGION 1..7: note = epitope
QPQPFPS

SEQ ID NO: 839 - protein, 7 aa, synthetic construct
  REGION 1..7: note = epitope
  SITE 1: note = misc_feature - Xaa can be any naturally occurring amino acid
XPQPFPS

SEQ ID NO: 840 - protein, 7 aa, synthetic construct
  REGION 1..7: note = epitope
  REGION 1..2: note = misc_feature - Xaa can be any naturally occurring amino acid
  SITE 5: note = misc_feature - Xaa can be any naturally occurring amino acid
XXQPXPS

SEQ ID NO: 841 - protein, 4 aa, synthetic construct
  REGION 1..4: note = epitope
PQPF

SEQ ID NO: 842 - protein, 15 aa, synthetic construct
  REGION 1..15: note = epitope
  REGION 1..2: note = misc_feature - Xaa can be any naturally occurring amino acid
  REGION 4..7: note = misc_feature - Xaa can be any naturally occurring amino acid
  SITE 9: note = misc_feature - Xaa can be any naturally occurring amino acid
XXYXXXXPXPSQQPY

SEQ ID NO: 843 - protein, 15 aa, synthetic construct
  REGION 1..15: note = epitope
  REGION 1..2: note = misc_feature - Xaa can be any naturally occurring amino acid
  REGION 4..9: note = misc_feature - Xaa can be any naturally occurring amino acid
  SITE 14: note = misc_feature - Xaa can be any naturally occurring amino acid
XXYXXXXXXPSQQXY

SEQ ID NO: 844 - protein, 7 aa, synthetic construct
  REGION 1..7: note = epitope
PQPQPFP

SEQ ID NO: 845 - protein, 6 aa, synthetic construct
  REGION 1..6: note = epitope
PQPQPF

SEQ ID NO: 846 - protein, 15 aa, synthetic construct
  REGION 1..15: note = epitope
  SITE 4: note = misc_feature - Xaa can be any naturally occurring amino acid
QPYXQPQPFPSQQPY

SEQ ID NO: 847 - protein, 15 aa, synthetic construct
  REGION 1..15: note = epitope
  SITE 1: note = misc_feature - Xaa can be any naturally occurring amino acid
  SITE 4: note = misc_feature - Xaa can be any naturally occurring amino acid
XPYXQPQPFPSQQPY

SEQ ID NO: 848 - protein, 5 aa, synthetic construct
  REGION 1..5: note = epitope
QPFPS

SEQ ID NO: 849 - protein, 15 aa, synthetic construct
  REGION 1..15: note = epitope
  REGION 4..5: note = misc_feature - Xaa can be any naturally occurring amino acid
  SITE 11: note = misc_feature - Xaa can be any naturally occurring amino acid
  SITE 14: note = misc_feature - Xaa can be any naturally occurring amino acid
QPYXXPQPFPXQQXY

SEQ ID NO: 850 - protein, 15 aa, synthetic construct
  REGION 1..15: note = epitope
  REGION 4..7: note = misc_feature - Xaa can be any naturally occurring amino acid
  SITE 9: note = misc_feature - Xaa can be any naturally occurring amino acid
  SITE 11: note = misc_feature - Xaa can be any naturally occurring amino acid
  REGION 14..15: note = misc_feature - Xaa can be any naturally occurring amino acid
QPYXXXXPXPXQQXX

SEQ ID NO: 851 - protein, 7 aa, synthetic construct
  REGION 1..7: note = epitope
PQPQPFP

SEQ ID NO: 852 - protein, 6 aa, synthetic construct
  REGION 1..6: note = epitope
QPQPFP

SEQ ID NO: 853 - protein, 6 aa, synthetic construct
  REGION 1..6: note = epitope
  SITE 1: note = misc_feature - Xaa can be any naturally occurring amino acid
XPQPFP

SEQ ID NO: 854 - protein, 15 aa, synthetic construct
  REGION 1..15: note = epitope
  SITE 1: note = misc_feature - Xaa can be any naturally occurring amino acid
  SITE 4: note = misc_feature - Xaa can be any naturally occurring amino acid
  SITE 12: note = misc_feature - Xaa can be any naturally occurring amino acid
XPYXQPQPFPSXQPY

SEQ ID NO: 855 - protein, 15 aa, synthetic construct
  REGION 1..15: note = epitope
  REGION 1..2: note = misc_feature - Xaa can be any naturally occurring amino acid
  SITE 4: note = misc_feature - Xaa can be any naturally occurring amino acid
  SITE 12: note = misc_feature - Xaa can be any naturally occurring amino acid
XXYXQPQPFPSXQPY

SEQ ID NO: 856 - protein, 9 aa, synthetic construct
  REGION 1..9: note = epitope
YPQPQPFPS

SEQ ID NO: 857 - protein, 7 aa, synthetic construct
  REGION 1..7: note = epitope
PQPQPFP

SEQ ID NO: 858 - protein, 7 aa, synthetic construct
  REGION 1..7: note = epitope
  SITE 1: note = misc_feature - Xaa can be any naturally occurring amino acid
XQPQPFP

SEQ ID NO: 859 - protein, 15 aa, synthetic construct
  REGION 1..15: note = epitope
  SITE 1: note = misc_feature - Xaa can be any naturally occurring amino acid
  SITE 4: note = misc_feature - Xaa can be any naturally occurring amino acid
XPYXQPQPFPSQQPY

SEQ ID NO: 860 - protein, 15 aa, synthetic construct
  REGION 1..15: note = epitope
  REGION 1..2: note = misc_feature - Xaa can be any naturally occurring amino acid
  REGION 4..7: note = misc_feature - Xaa can be any naturally occurring amino acid
  SITE 11: note = misc_feature - Xaa can be any naturally occurring amino acid
XXYXXXXPFPXQQPY

SEQ ID NO: 861 - protein, 9 aa, synthetic construct
  REGION 1..9: note = epitope
YPQPQPFPS

SEQ ID NO: 862 - protein, 7 aa, synthetic construct
  REGION 1..7: note = epitope
PQPQPFP

SEQ ID NO: 863 - protein, 7 aa, synthetic construct
  REGION 1..7: note = epitope
  SITE 1: note = misc_feature - Xaa can be any naturally occurring amino acid
XQPQPFP

SEQ ID NO: 864 - protein, 15 aa, synthetic construct
  REGION 1..15: note = epitope
  REGION 1..2: note = misc_feature - Xaa can be any naturally occurring amino acid
  REGION 4..5: note = misc_feature - Xaa can be any naturally occurring amino acid
  SITE 14: note = misc_feature - Xaa can be any naturally occurring amino acid
XXYXXPQPFPSQQXY

SEQ ID NO: 865 - protein, 15 aa, synthetic construct
  REGION 1..15: note = epitope
  REGION 1..9: note = misc_feature - Xaa can be any naturally occurring amino acid
  SITE 11: note = misc_feature - Xaa can be any naturally occurring amino acid
  SITE 14: note = misc_feature - Xaa can be any naturally occurring amino acid
XXXXXXXXXPXQQXY

SEQ ID NO: 866 - protein, 8 aa, synthetic construct
  REGION 1..8: note = epitope
QPQPFPSQ

SEQ ID NO: 867 - protein, 5 aa, synthetic construct
  REGION 1..5: note = epitope
QPQPF

SEQ ID NO: 868 - protein, 5 aa, synthetic construct
  REGION 1..5: note = epitope
  SITE 1: note = misc_feature - Xaa can be any naturally occurring amino acid
XPQPF

SEQ ID NO: 869 - protein, 15 aa, synthetic construct
  REGION 1..15: note = epitope
  SITE 1: note = misc_feature - Xaa can be any naturally occurring amino acid
  REGION 4..5: note = misc_feature - Xaa can be any naturally occurring amino acid
  REGION 9..10: note = misc_feature - Xaa can be any naturally occurring amino acid
  REGION 14..15: note = misc_feature - Xaa can be any naturally occurring amino acid
XPYXXPQPXXSQQXX

SEQ ID NO: 870 - protein, 6 aa, synthetic construct
  REGION 1..6: note = epitope
PQPQPF

SEQ ID NO: 871 - protein, 15 aa, synthetic construct
  REGION 1..15: note = epitope
  SITE 3: note = misc_feature - Xaa can be any naturally occurring amino acid
  SITE 11: note = misc_feature - Xaa can be any naturally occurring amino acid
QPXPQPQPFPXQQPY

SEQ ID NO: 872 - protein, 15 aa, synthetic construct
  REGION 1..15: note = epitope
  REGION 3..5: note = misc_feature - Xaa can be any naturally occurring amino acid
  SITE 11: note = misc_feature - Xaa can be any naturally occurring amino acid
QPXXXPQPFPXQQPY

SEQ ID NO: 873 - protein, 9 aa, synthetic construct
  REGION 1..9: note = epitope
PYPQPQPFP

SEQ ID NO: 874 - protein, 9 aa, synthetic construct
  REGION 1..9: note = epitope
  REGION 2..4: note = misc_feature - Xaa can be any naturally occurring amino acid
PXXXPQPFP

SEQ ID NO: 875 - protein, 5 aa, synthetic construct
  REGION 1..5: note = epitope
PQPQP

SEQ ID NO: 876 - protein, 15 aa, synthetic construct
  REGION 1..15: note = epitope
  REGION 1..2: note = misc_feature - Xaa can be any naturally occurring amino acid
  REGION 4..5: note = misc_feature - Xaa can be any naturally occurring amino acid
  SITE 7: note = misc_feature - Xaa can be any naturally occurring amino acid
  SITE 14: note = misc_feature - Xaa can be any naturally occurring amino acid
XXYXXPXPFPSQQXY

SEQ ID NO: 877 - protein, 10 aa, synthetic construct
  REGION 1..10: note = epitope
YPQPQPFPSQ

SEQ ID NO: 878 - protein, 10 aa, synthetic construct
  REGION 1..10: note = epitope
  REGION 2..3: note = misc_feature - Xaa can be any naturally occurring amino acid
  SITE 5: note = misc_feature - Xaa can be any naturally occurring amino acid
YXXPXPFPSQ

SEQ ID NO: 879 - protein, 8 aa, synthetic construct
  REGION 1..8: note = epitope
QPFPSQQP

SEQ ID NO: 880 - protein, 8 aa, synthetic construct
  REGION 1..8: note = epitope
  SITE 1: note = misc_feature - Xaa can be any naturally occurring amino acid
  SITE 8: note = misc_feature - Xaa can be any naturally occurring amino acid
XPFPSQQX

SEQ ID NO: 881 - protein, 15 aa, synthetic construct
  REGION 1..15: note = epitope
  REGION 1..2: note = misc_feature - Xaa can be any naturally occurring amino acid
  REGION 4..6: note = misc_feature - Xaa can be any naturally occurring amino acid
  SITE 15: note = misc_feature - Xaa can be any naturally occurring amino acid
XXYXXXQPFPSQQPX

SEQ ID NO: 882 - protein, 4 aa, synthetic construct
  REGION 1..4: note = epitope
QPQP

SEQ ID NO: 883 - protein, 15 aa, synthetic construct
  REGION 1..15: note = epitope
  SITE 2: note = misc_feature - Xaa can be any naturally occurring amino acid
  SITE 4: note = misc_feature - Xaa can be any naturally occurring amino acid
  SITE 7: note = misc_feature - Xaa can be any naturally occurring amino acid
  REGION 10..15: note = misc_feature - Xaa can be any naturally occurring amino acid
QXYXQPXPFXXXXXX

SEQ ID NO: 884 - protein, 15 aa, synthetic construct
  REGION 1..15: note = epitope
  REGION 1..4: note = misc_feature - Xaa can be any naturally occurring amino acid
  SITE 7: note = misc_feature - Xaa can be any naturally occurring amino acid
  REGION 10..15: note = misc_feature - Xaa can be any naturally occurring amino acid
XXXXQPXPFXXXXXX

SEQ ID NO: 885 - protein, 6 aa, synthetic construct
  REGION 1..6: note = epitope
PQPFPS

SEQ ID NO: 886 - protein, 15 aa, synthetic construct
  REGION 1..15: note = epitope
  SITE 1: note = misc_feature - Xaa can be any naturally occurring amino acid
  REGION 4..5: note = misc_feature - Xaa can be any naturally occurring amino acid
  REGION 13..15: note = misc_feature - Xaa can be any naturally occurring amino acid
XPYXXPQPFPSQXXX

SEQ ID NO: 887 - protein, 15 aa, synthetic construct
  REGION 1..15: note = epitope
  SITE 1: note = misc_feature - Xaa can be any naturally occurring amino acid
  REGION 4..5: note = misc_feature - Xaa can be any naturally occurring amino acid
  REGION 11..15: note = misc_feature - Xaa can be any naturally occurring amino acid
XPYXXPQPFPXXXXX

SEQ ID NO: 888 - protein, 7 aa, synthetic construct
  REGION 1..7: note = epitope
PQPQPFP

SEQ ID NO: 889 - protein, 7 aa, synthetic construct
  REGION 1..7: note = epitope
  REGION 1..2: note = misc_feature - Xaa can be any naturally occurring amino acid
XXPQPFP

SEQ ID NO: 890 - protein, 15 aa, synthetic construct
  REGION 1..15: note = epitope
  SITE 12: note = misc_feature - Xaa can be any naturally occurring amino acid
  SITE 15: note = misc_feature - Xaa can be any naturally occurring amino acid
QPYPQPQPFPSXQPX

SEQ ID NO: 891 - protein, 15 aa, synthetic construct
  REGION 1..15: note = epitope
  SITE 1: note = misc_feature - Xaa can be any naturally occurring amino acid
  SITE 7: note = misc_feature - Xaa can be any naturally occurring amino acid
  SITE 12: note = misc_feature - Xaa can be any naturally occurring amino acid
  REGION 14..15: note = misc_feature - Xaa can be any naturally occurring amino acid
XPYPQPXPFPSXQXX

SEQ ID NO: 892 - protein, 4 aa, synthetic construct
  REGION 1..4: note = epitope
YPQP

SEQ ID NO: 893 - protein, 15 aa, synthetic construct
  REGION 1..15: note = epitope
  REGION 1..2: note = misc_feature - Xaa can be any naturally occurring amino acid
  REGION 4..5: note = misc_feature - Xaa can be any naturally occurring amino acid
  REGION 7..8: note = misc_feature - Xaa can be any naturally occurring amino acid
  REGION 10..11: note = misc_feature - Xaa can be any naturally occurring amino acid
XXYXXPXXFXXQQPY

SEQ ID NO: 894 - protein, 15 aa, synthetic construct
  REGION 1..15: note = epitope
  REGION 1..11: note = misc_feature - Xaa can be any naturally occurring amino acid
XXXXXXXXXXXQQPY

SEQ ID NO: 895 - protein, 7 aa, synthetic construct
  REGION 1..7: note = epitope
PQPQPFP

SEQ ID NO: 896 - protein, 6 aa, synthetic construct
  REGION 1..6: note = epitope
PQPQPF

SEQ ID NO: 897 - protein, 6 aa, synthetic construct
  REGION 1..6: note = epitope
PSQQPY

SEQ ID NO: 898 - protein, 6 aa, synthetic construct
  REGION 1..6: note = epitope
  REGION 1..2: note = misc_feature - Xaa can be any naturally occurring amino acid
XXQQPY

SEQ ID NO: 899 - protein, 15 aa, synthetic construct
  REGION 1..15: note = epitope
LGQQQQQFPGQQQPF

SEQ ID NO: 900 - protein, 15 aa, synthetic construct
  REGION 1..15: note = epitope
  REGION 1..4: note = misc_feature - Xaa can be any naturally occurring amino acid
  REGION 8..10: note = misc_feature - Xaa can be any naturally occurring amino acid
  REGION 14..15: note = misc_feature - Xaa can be any naturally occurring amino acid
XXXXQQQXXXQQQXX

SEQ ID NO: 901 - protein, 10 aa, synthetic construct
  REGION 1..10: note = epitope
LGQQQQQFPG

SEQ ID NO: 902 - protein, 10 aa, synthetic construct
  REGION 1..10: note = epitope
QQQQFPGQQQ

SEQ ID NO: 903 - protein, 10 aa, synthetic construct
  REGION 1..10: note = epitope
  SITE 1: note = misc_feature - Xaa can be any naturally occurring amino acid
  REGION 5..7: note = misc_feature - Xaa can be any naturally occurring amino acid
XQQQXXXQQQ

SEQ ID NO: 904 - protein, 10 aa, synthetic construct
  REGION 1..10: note = epitope
QQFPGQQQPF

SEQ ID NO: 905 - protein, 10 aa, synthetic construct
  REGION 1..10: note = epitope
  REGION 3..5: note = misc_feature - Xaa can be any naturally occurring amino acid
  REGION 9..10: note = misc_feature - Xaa can be any naturally occurring amino acid
QQXXXQQQXX

SEQ ID NO: 906 - protein, 15 aa, synthetic construct
  REGION 1..15: note = epitope
  REGION 1..2: note = misc_feature - Xaa can be any naturally occurring amino acid
  REGION 8..11: note = misc_feature - Xaa can be any naturally occurring amino acid
  REGION 13..15: note = misc_feature - Xaa can be any naturally occurring amino acid
XXQQQQQXXXXQXXX

SEQ ID NO: 907 - protein, 10 aa, synthetic construct
  REGION 1..10: note = epitope
QQQQQFPGQQ

SEQ ID NO: 908 - protein, 8 aa, synthetic construct
  REGION 1..8: note = epitope
QQQQFPGQ

SEQ ID NO: 909 - protein, 8 aa, synthetic construct
  REGION 1..8: note = epitope
  REGION 5..8: note = misc_feature - Xaa can be any naturally occurring amino acid
QQQQXXXX

SEQ ID NO: 910 - protein, 10 aa, synthetic construct
  REGION 1..10: note = epitope
QQFPGQQQPF

SEQ ID NO: 911 - protein, 4 aa, synthetic construct
  REGION 1..4: note = epitope
QFPG

SEQ ID NO: 912 - protein, 15 aa, synthetic construct
  REGION 1..15: note = epitope
  REGION 1..2: note = misc_feature - Xaa can be any naturally occurring amino acid
  SITE 6: note = misc_feature - Xaa can be any naturally occurring amino acid
  SITE 8: note = misc_feature - Xaa can be any naturally occurring amino acid
  REGION 10..11: note = misc_feature - Xaa can be any naturally occurring amino acid
  REGION 13..15: note = misc_feature - Xaa can be any naturally occurring amino acid
XXQQQXQXPXXQXXX

SEQ ID NO: 913 - protein, 9 aa, synthetic construct
  REGION 1..9: note = epitope
QQFLGQQQQ

SEQ ID NO: 914 - protein, 9 aa, synthetic construct
  REGION 1..9: note = epitope
  REGION 4..5: note = misc_feature - Xaa can be any naturally occurring amino acid
  SITE 9: note = misc_feature - Xaa can be any naturally occurring amino acid
QQFXXQQQX

SEQ ID NO: 915 - protein, 9 aa, synthetic construct
  REGION 1..9: note = epitope
QQQFPGQQQ

SEQ ID NO: 916 - protein, 9 aa, synthetic construct
  REGION 1..9: note = epitope
  SITE 2: note = misc_feature - Xaa can be any naturally occurring amino acid
  SITE 4: note = misc_feature - Xaa can be any naturally occurring amino acid
  REGION 6..7: note = misc_feature - Xaa can be any naturally occurring amino acid
  SITE 9: note = misc_feature - Xaa can be any naturally occurring amino acid
QXQXPXXQX

SEQ ID NO: 917 - protein, 5 aa, synthetic construct
  REGION 1..5: note = epitope
QQFPG

SEQ ID NO: 918 - protein, 15 aa, synthetic construct
  REGION 1..15: note = epitope
  SITE 2: note = misc_feature - Xaa can be any naturally occurring amino acid
  REGION 6..15: note = misc_feature - Xaa can be any naturally occurring amino acid
LXQQQXXXXXXXXXX

SEQ ID NO: 919 - protein, 10 aa, synthetic construct
  REGION 1..10: note = epitope
LGQQQQQFPG

SEQ ID NO: 920 - protein, 10 aa, synthetic construct
  REGION 1..10: note = epitope
QQQQQFPGQQ

SEQ ID NO: 921 - protein, 10 aa, synthetic construct
  REGION 1..10: note = epitope
QQFPGQQQPF

SEQ ID NO: 922 - protein, 15 aa, synthetic construct
  REGION 1..15: note = epitope
  REGION 1..3: note = misc_feature - Xaa can be any naturally occurring amino acid
  REGION 8..11: note = misc_feature - Xaa can be any naturally occurring amino acid
  REGION 13..15: note = misc_feature - Xaa can be any naturally occurring amino acid
XXXQQQQXXXXQXXX

SEQ ID NO: 923 - protein, 10 aa, synthetic construct
  REGION 1..10: note = epitope
LGQQQQQFPG

SEQ ID NO: 924 - protein, 10 aa, synthetic construct
  REGION 1..10: note = epitope
  REGION 1..3: note = misc_feature - Xaa can be any naturally occurring amino acid
  REGION 8..10: note = misc_feature - Xaa can be any naturally occurring amino acid
XXXQQQQXXX

SEQ ID NO: 925 - protein, 8 aa, synthetic construct
  REGION 1..8: note = epitope
QQFPGQQQ

SEQ ID NO: 926 - protein, 5 aa, synthetic construct
  REGION 1..5: note = epitope
FPGQQ

SEQ ID NO: 927 - protein, 15 aa, synthetic construct
  REGION 1..15: note = epitope
  REGION 1..2: note = misc_feature - Xaa can be any naturally occurring amino acid
  REGION 8..10: note = misc_feature - Xaa can be any naturally occurring amino acid
  REGION 13..15: note = misc_feature - Xaa can be any naturally occurring amino acid
XXQQQQQXXXQQXXX

SEQ ID NO: 928 - protein, 15 aa, synthetic construct
  REGION 1..15: note = epitope
  REGION 1..4: note = misc_feature - Xaa can be any naturally occurring amino acid
  REGION 8..11: note = misc_feature - Xaa can be any naturally occurring amino acid
  REGION 13..15: note = misc_feature - Xaa can be any naturally occurring amino acid
XXXXQQQXXXXQXXX

SEQ ID NO: 929 - protein, 8 aa, synthetic construct
  REGION 1..8: note = epitope
QQFPGQQQ

SEQ ID NO: 930 - protein, 7 aa, synthetic construct
  REGION 1..7: note = epitope
QQFPGQQ

SEQ ID NO: 931 - protein, 15 aa, synthetic construct
  REGION 1..15: note = epitope
  REGION 1..2: note = misc_feature - Xaa can be any naturally occurring amino acid
  REGION 8..11: note = misc_feature - Xaa can be any naturally occurring amino acid
  REGION 14..15: note = misc_feature - Xaa can be any naturally occurring amino acid
XXQQQQQXXXXQQXX

SEQ ID NO: 932 - protein, 15 aa, synthetic construct
  REGION 1..15: note = epitope
  REGION 1..4: note = misc_feature - Xaa can be any naturally occurring amino acid
  REGION 8..11: note = misc_feature - Xaa can be any naturally occurring amino acid
  REGION 14..15: note = misc_feature - Xaa can be any naturally occurring amino acid
XXXXQQQXXXXQQXX

SEQ ID NO: 933 - protein, 10 aa, synthetic construct
  REGION 1..10: note = epitope
QQQFPGQQQP

SEQ ID NO: 934 - protein, 8 aa, synthetic construct
  REGION 1..8: note = epitope
QQFPGQQQ

SEQ ID NO: 935 - protein, 8 aa, synthetic construct
  REGION 1..8: note = epitope
  REGION 3..6: note = misc_feature - Xaa can be any naturally occurring amino acid
QQXXXXQQ

SEQ ID NO: 936 - protein, 15 aa, synthetic construct
  REGION 1..15: note = epitope
  REGION 2..4: note = misc_feature - Xaa can be any naturally occurring amino acid
  REGION 7..11: note = misc_feature - Xaa can be any naturally occurring amino acid
  REGION 13..15: note = misc_feature - Xaa can be any naturally occurring amino acid
LXXXQQXXXXXQXXX

SEQ ID NO: 937 - protein, 10 aa, synthetic construct
  REGION 1..10: note = epitope
LGQQQQQFPG

SEQ ID NO: 938 - protein, 9 aa, synthetic construct
  REGION 1..9: note = epitope
QQQFPGQQQ

SEQ ID NO: 939 - protein, 8 aa, synthetic construct
  REGION 1..8: note = epitope
QQFPGQQQ

SEQ ID NO: 940 - protein, 7 aa, synthetic construct
  REGION 1..7: note = epitope
QQFPGQQ

SEQ ID NO: 941 - protein, 15 aa, synthetic construct
  REGION 1..15: note = epitope
  SITE 2: note = misc_feature - Xaa can be any naturally occurring amino acid
  REGION 8..11: note = misc_feature - Xaa can be any naturally occurring amino acid
  REGION 14..15: note = misc_feature - Xaa can be any naturally occurring amino acid
LXQQQQQXXXXQQXX

SEQ ID NO: 942 - protein, 15 aa, synthetic construct
  REGION 1..15: note = epitope
  REGION 1..3: note = misc_feature - Xaa can be any naturally occurring amino acid
  SITE 6: note = misc_feature - Xaa can be any naturally occurring amino acid
  REGION 8..11: note = misc_feature - Xaa can be any naturally occurring amino acid
  REGION 13..15: note = misc_feature - Xaa can be any naturally occurring amino acid
XXXQQXQXXXXQXXX

SEQ ID NO: 943 - protein, 10 aa, synthetic construct
  REGION 1..10: note = epitope
QQQQFPGQQQ

SEQ ID NO: 944 - protein, 7 aa, synthetic construct
  REGION 1..7: note = epitope
QQQQFPG

SEQ ID NO: 945 - protein, 7 aa, synthetic construct
  REGION 1..7: note = epitope
  REGION 5..7: note = misc_feature - Xaa can be any naturally occurring amino acid
QQQQXXX

SEQ ID NO: 946 - protein, 10 aa, synthetic construct
  REGION 1..10: note = epitope
QQFPGQQQPF

SEQ ID NO: 947 - protein, 9 aa, synthetic construct
  REGION 1..9: note = epitope
QFPGQQQPF

SEQ ID NO: 948 - protein, 15 aa, synthetic construct
  REGION 1..15: note = epitope
  REGION 1..3: note = misc_feature - Xaa can be any naturally occurring amino acid
  SITE 6: note = misc_feature - Xaa can be any naturally occurring amino acid
  REGION 8..10: note = misc_feature - Xaa can be any naturally occurring amino acid
  REGION 13..15: note = misc_feature - Xaa can be any naturally occurring amino acid
XXXQQXQXXXQQXXX

SEQ ID NO: 949 - protein, 9 aa, synthetic construct
  REGION 1..9: note = epitope
QFPGQQQPF

SEQ ID NO: 950 - protein, 7 aa, synthetic construct
  REGION 1..7: note = epitope
QFPGQQQ

SEQ ID NO: 951 - protein, 7 aa, synthetic construct
  REGION 1..7: note = epitope
QQFPGQQ

SEQ ID NO: 952 - protein, 5 aa, synthetic construct
  REGION 1..5: note = epitope
QQFPG

SEQ ID NO: 953 - protein, 15 aa, synthetic construct
  REGION 1..15: note = epitope
  REGION 1..5: note = misc_feature - Xaa can be any naturally occurring amino acid
  SITE 7: note = misc_feature - Xaa can be any naturally occurring amino acid
  REGION 14..15: note = misc_feature - Xaa can be any naturally occurring amino acid
XXXXXQXFPGQQQXX

SEQ ID NO: 954 - protein, 15 aa, synthetic construct
  REGION 1..15: note = epitope
  REGION 1..5: note = misc_feature - Xaa can be any naturally occurring amino acid
  REGION 7..8: note = misc_feature - Xaa can be any naturally occurring amino acid
  SITE 12: note = misc_feature - Xaa can be any naturally occurring amino acid
  REGION 14..15: note = misc_feature - Xaa can be any naturally occurring amino acid
XXXXXQXXPGQXQXX

SEQ ID NO: 955 - protein, 15 aa, synthetic construct
  REGION 1..15: note = epitope
  REGION 1..5: note = misc_feature - Xaa can be any naturally occurring amino acid
  REGION 7..8: note = misc_feature - Xaa can be any naturally occurring amino acid
  REGION 12..15: note = misc_feature - Xaa can be any naturally occurring amino acid
XXXXXQXXPGQXXXX

SEQ ID NO: 956 - protein, 8 aa, synthetic construct
  REGION 1..8: note = epitope
QQFPGQQQ

SEQ ID NO: 957 - protein, 8 aa, synthetic construct
  REGION 1..8: note = epitope
  SITE 2: note = misc_feature - Xaa can be any naturally occurring amino acid
QXFPGQQQ

SEQ ID NO: 958 - protein, 8 aa, synthetic construct
  REGION 1..8: note = epitope
  REGION 2..3: note = misc_feature - Xaa can be any naturally occurring amino acid
  SITE 7: note = misc_feature - Xaa can be any naturally occurring amino acid
QXXPGQXQ

SEQ ID NO: 959 - protein, 8 aa, synthetic construct
  REGION 1..8: note = epitope
  REGION 2..3: note = misc_feature - Xaa can be any naturally occurring amino acid
  REGION 7..8: note = misc_feature - Xaa can be any naturally occurring amino acid
QXXPGQXX

SEQ ID NO: 960 - protein, 6 aa, synthetic construct
  REGION 1..6: note = epitope
LGQQQQ

SEQ ID NO: 961 - protein, 8 aa, synthetic construct
  REGION 1..8: note = epitope
QQQFPGQQ

SEQ ID NO: 962 - protein, 5 aa, synthetic construct
  REGION 1..5: note = epitope
FPGQQ

SEQ ID NO: 963 - protein, 15 aa, synthetic construct
  REGION 1..15: note = epitope
  REGION 1..2: note = misc_feature - Xaa can be any naturally occurring amino acid
  SITE 4: note = misc_feature - Xaa can be any naturally occurring amino acid
  REGION 8..15: note = misc_feature - Xaa can be any naturally occurring amino acid
XXQXQQQXXXXXXXX

SEQ ID NO: 964 - protein, 10 aa, synthetic construct
  REGION 1..10: note = epitope
QQQQFPGQQQ

SEQ ID NO: 965 - protein, 9 aa, synthetic construct
  REGION 1..9: note = epitope
QQQFPGQQQ

SEQ ID NO: 966 - protein, 7 aa, synthetic construct
  REGION 1..7: note = epitope
QQFPGQQ

SEQ ID NO: 967 - protein, 15 aa, synthetic construct
  REGION 1..15: note = epitope
  SITE 3: note = misc_feature - Xaa can be any naturally occurring amino acid
  REGION 11..15: note = misc_feature - Xaa can be any naturally occurring amino acid
LGXQQQQFPGXXXXX

SEQ ID NO: 968 - protein, 10 aa, synthetic construct
  REGION 1..10: note = epitope
QQQQFPGQQQ

SEQ ID NO: 969 - protein, 5 aa, synthetic construct
  REGION 1..5: note = epitope
QQQFP

SEQ ID NO: 970 - protein, 5 aa, synthetic construct
  REGION 1..5: note = epitope
  SITE 5: note = misc_feature - Xaa can be any naturally occurring amino acid
QQQFX

SEQ ID NO: 971 - protein, 15 aa, synthetic construct
  REGION 1..15: note = epitope
  SITE 1: note = misc_feature - Xaa can be any naturally occurring amino acid
  SITE 4: note = misc_feature - Xaa can be any naturally occurring amino acid
  REGION 9..15: note = misc_feature - Xaa can be any naturally occurring amino acid
XGQXQQQFXXXXXXX

SEQ ID NO: 972 - protein, 15 aa, synthetic construct
  REGION 1..15: note = epitope
  REGION 1..2: note = misc_feature - Xaa can be any naturally occurring amino acid
  SITE 4: note = misc_feature - Xaa can be any naturally occurring amino acid
  REGION 9..15: note = misc_feature - Xaa can be any naturally occurring amino acid
XXQXQQQFXXXXXXX

SEQ ID NO: 973 - protein, 4 aa, synthetic construct
  REGION 1..4: note = epitope
QQQQ

SEQ ID NO: 974 - protein, 15 aa, synthetic construct
  REGION 1..15: note = epitope
QPFPQQQQPIIILQQ

SEQ ID NO: 975 - protein, 9 aa, synthetic construct
  REGION 1..9: note = epitope
QPFPQQQQP

SEQ ID NO: 976 - protein, 5 aa, synthetic construct
  REGION 1..5: note = epitope
IIILQ

SEQ ID NO: 977 - protein, 7 aa, synthetic construct
  REGION 1..7: note = epitope
QPFPQQQ

SEQ ID NO: 978 - protein, 10 aa, synthetic construct
  REGION 1..10: note = epitope
FPQQQQPIII

SEQ ID NO: 979 - protein, 5 aa, synthetic construct
  REGION 1..5: note = epitope
IIILQ

SEQ ID NO: 980 - protein, 6 aa, synthetic construct
  REGION 1..6: note = epitope
QPFPQQ

SEQ ID NO: 981 - protein, 4 aa, synthetic construct
  REGION 1..4: note = epitope
PFPQ

SEQ ID NO: 982 - protein, 5 aa, synthetic construct
  REGION 1..5: note = epitope
IIILQ

SEQ ID NO: 983 - protein, 15 aa, synthetic construct
  REGION 1..15: note = epitope
  REGION 1..5: note = misc_feature - Xaa can be any naturally occurring amino acid
  SITE 7: note = misc_feature - Xaa can be any naturally occurring amino acid
  REGION 14..15: note = misc_feature - Xaa can be any naturally occurring amino acid
XXXXXQXQPIIILXX

SEQ ID NO: 984 - protein, 8 aa, synthetic construct
  REGION 1..8: note = epitope
QPFPQQQQ

SEQ ID NO: 985 - protein, 7 aa, synthetic construct
  REGION 1..7: note = epitope
QPFPQQQ

SEQ ID NO: 986 - protein, 5 aa, synthetic construct
  REGION 1..5: note = epitope
IIILQ

SEQ ID NO: 987 - protein, 5 aa, synthetic construct
  REGION 1..5: note = epitope
  SITE 5: note = misc_feature - Xaa can be any naturally occurring amino acid
IIILX

SEQ ID NO: 988 - protein, 6 aa, synthetic construct
  REGION 1..6: note = epitope
QPFPQQ

SEQ ID NO: 989 - protein, 5 aa, synthetic construct
  REGION 1..5: note = epitope
IIILQ

SEQ ID NO: 990 - protein, 15 aa, synthetic construct
  REGION 1..15: note = epitope
  REGION 2..4: note = misc_feature - Xaa can be any naturally occurring amino acid
  REGION 8..10: note = misc_feature - Xaa can be any naturally occurring amino acid
  SITE 12: note = misc_feature - Xaa can be any naturally occurring amino acid
  SITE 14: note = misc_feature - Xaa can be any naturally occurring amino acid
QXXXQQQXXXIXLXQ

SEQ ID NO: 991 - protein, 15 aa, synthetic construct
  REGION 1..15: note = epitope
  REGION 1..5: note = misc_feature - Xaa can be any naturally occurring amino acid
  REGION 7..9: note = misc_feature - Xaa can be any naturally occurring amino acid
  REGION 14..15: note = misc_feature - Xaa can be any naturally occurring amino acid
XXXXXQXXXIIILXX

SEQ ID NO: 992 - protein, 15 aa, synthetic construct
  REGION 1..15: note = epitope
  REGION 1..9: note = misc_feature - Xaa can be any naturally occurring amino acid
  REGION 14..15: note = misc_feature - Xaa can be any naturally occurring amino acid
XXXXXXXXXIIILXX

SEQ ID NO: 993 - protein, 10 aa, synthetic construct
  REGION 1..10: note = epitope
QQQQPIIILQ

SEQ ID NO: 994 - protein, 10 aa, synthetic construct
  REGION 1..10: note = epitope
  SITE 1: note = misc_feature - Xaa can be any naturally occurring amino acid
  REGION 3..5: note = misc_feature - Xaa can be any naturally occurring amino acid
  SITE 10: note = misc_feature - Xaa can be any naturally occurring amino acid
XQXXXIIILX

SEQ ID NO: 995 - protein, 10 aa, synthetic construct
  REGION 1..10: note = epitope
  REGION 1..5: note = misc_feature - Xaa can be any naturally occurring amino acid
  SITE 10: note = misc_feature - Xaa can be any naturally occurring amino acid
XXXXXIIILX

SEQ ID NO: 996 - protein, 7 aa, synthetic construct
  REGION 1..7: note = epitope
QPFPQQQ

SEQ ID NO: 997 - protein, 6 aa, synthetic construct
  REGION 1..6: note = epitope
PFPQQQ

SEQ ID NO: 998 - protein, 5 aa, synthetic construct
  REGION 1..5: note = epitope
IIILQ

SEQ ID NO: 999 - protein, 10 aa, synthetic construct
  REGION 1..10: note = epitope
QQQQPIIILQ

SEQ ID NO: 1000 - protein, 10 aa, synthetic construct
  REGION 1..10: note = epitope
QPFPQQQQPI

SEQ ID NO: 1001 - protein, 6 aa, synthetic construct
  REGION 1..6: note = epitope
PIIILQ

SEQ ID NO: 1002 - protein, 5 aa, synthetic construct
  REGION 1..5: note = epitope
IIILQ

SEQ ID NO: 1003 - protein, 6 aa, synthetic construct
  REGION 1..6: note = epitope
QPFPQQ

SEQ ID NO: 1004 - protein, 10 aa, synthetic construct
  REGION 1..10: note = epitope
QQQQPIIILQ

SEQ ID NO: 1005 - protein, 7 aa, synthetic construct
  REGION 1..7: note = epitope
QPFPQQQ

SEQ ID NO: 1006 - protein, 8 aa, synthetic construct
  REGION 1..8: note = epitope
IIILQQSP

SEQ ID NO: 1007 - protein, 15 aa, synthetic construct
  REGION 1..15: note = epitope
  SITE 2: note = misc_feature - Xaa can be any naturally occurring amino acid
  REGION 14..15: note = misc_feature - Xaa can be any naturally occurring amino acid
QXFPQQQQPIIILXX

SEQ ID NO: 1008 - protein, 15 aa, synthetic construct
  REGION 1..15: note = epitope
  REGION 1..3: note = misc_feature - Xaa can be any naturally occurring amino acid
  SITE 9: note = misc_feature - Xaa can be any naturally occurring amino acid
  REGION 14..15: note = misc_feature - Xaa can be any naturally occurring amino acid
XXXPQQQQXIIILXX

SEQ ID NO: 1009 - protein, 15 aa, synthetic construct
  REGION 1..15: note = epitope
  REGION 1..5: note = misc_feature - Xaa can be any naturally occurring amino acid
  REGION 7..9: note = misc_feature - Xaa can be any naturally occurring amino acid
  REGION 14..15: note = misc_feature - Xaa can be any naturally occurring amino acid
XXXXXQXXXIIILXX

SEQ ID NO: 1010 - protein, 15 aa, synthetic construct
  REGION 1..15: note = epitope
WLQQQLVPQLQQPLS

SEQ ID NO: 1011 - protein, 15 aa, synthetic construct
  REGION 1..15: note = epitope
  SITE 2: note = misc_feature - Xaa can be any naturally occurring amino acid
  SITE 7: note = misc_feature - Xaa can be any naturally occurring amino acid
  SITE 12: note = misc_feature - Xaa can be any naturally occurring amino acid
  REGION 14..15: note = misc_feature - Xaa can be any naturally occurring amino acid
WXQQQLXPQLQXPXX

SEQ ID NO: 1012 - protein, 15 aa, synthetic construct
  REGION 1..15: note = epitope
  REGION 1..3: note = misc_feature - Xaa can be any naturally occurring amino acid
  SITE 7: note = misc_feature - Xaa can be any naturally occurring amino acid
  REGION 12..15: note = misc_feature - Xaa can be any naturally occurring amino acid
XXXQQLXPQLQXXXX

SEQ ID NO: 1013 - protein, 15 aa, synthetic construct
  REGION 1..15: note = epitope
  REGION 1..3: note = misc_feature - Xaa can be any naturally occurring amino acid
  SITE 7: note = misc_feature - Xaa can be any naturally occurring amino acid
  REGION 11..15: note = misc_feature - Xaa can be any naturally occurring amino acid
XXXQQLXPQLXXXXX

SEQ ID NO: 1014 - protein, 10 aa, synthetic construct
  REGION 1..10: note = epitope
QLVPQLQQPL

SEQ ID NO: 1015 - protein, 10 aa, synthetic construct
  REGION 1..10: note = epitope
  SITE 3: note = misc_feature - Xaa can be any naturally occurring amino acid
  SITE 8: note = misc_feature - Xaa can be any naturally occurring amino acid
  SITE 10: note = misc_feature - Xaa can be any naturally occurring amino acid
QLXPQLQXPX

SEQ ID NO: 1016 - protein, 10 aa, synthetic construct
  REGION 1..10: note = epitope
  SITE 3: note = misc_feature - Xaa can be any naturally occurring amino acid
  REGION 8..10: note = misc_feature - Xaa can be any naturally occurring amino acid
QLXPQLQXXX

SEQ ID NO: 1017 - protein, 10 aa, synthetic construct
  REGION 1..10: note = epitope
  SITE 3: note = misc_feature - Xaa can be any naturally occurring amino acid
  REGION 7..10: note = misc_feature - Xaa can be any naturally occurring amino acid
QLXPQLXXXX

SEQ ID NO: 1018 - protein, 15 aa, synthetic construct
  REGION 1..15: note = epitope
  SITE 12: note = misc_feature - Xaa can be any naturally occurring amino acid
WLQQQLVPQLQXPLS

SEQ ID NO: 1019 - protein, 15 aa, synthetic construct
  REGION 1..15: note = epitope
  SITE 1: note = misc_feature - Xaa can be any naturally occurring amino acid
  SITE 12: note = misc_feature - Xaa can be any naturally occurring amino acid
  SITE 14: note = misc_feature - Xaa can be any naturally occurring amino acid
XLQQQLVPQLQXPXS

SEQ ID NO: 1020 - protein, 10 aa, synthetic construct
  REGION 1..10: note = epitope
  SITE 8: note = misc_feature - Xaa can be any naturally occurring amino acid
QLVPQLQXPL

SEQ ID NO: 1021 - protein, 10 aa, synthetic construct
  REGION 1..10: note = epitope
  SITE 8: note = misc_feature - Xaa can be any naturally occurring amino acid
  SITE 10: note = misc_feature - Xaa can be any naturally occurring amino acid
QLVPQLQXPX

SEQ ID NO: 1022 - protein, 15 aa, synthetic construct
  REGION 1..15: note = epitope
  REGION 1..4: note = misc_feature - Xaa can be any naturally occurring amino acid
  REGION 6..7: note = misc_feature - Xaa can be any naturally occurring amino acid
  REGION 12..14: note = misc_feature - Xaa can be any naturally occurring amino acid
XXXXQXXPQLQXXXS

SEQ ID NO: 1023 - protein, 15 aa, synthetic construct
  REGION 1..15: note = epitope
  REGION 1..4: note = misc_feature - Xaa can be any naturally occurring amino acid
  REGION 6..7: note = misc_feature - Xaa can be any naturally occurring amino acid
  REGION 12..15: note = misc_feature - Xaa can be any naturally occurring amino acid
XXXXQXXPQLQXXXX

SEQ ID NO: 1024 - protein, 15 aa, synthetic construct
  REGION 1..15: note = epitope
  REGION 1..4: note = misc_feature - Xaa can be any naturally occurring amino acid
  REGION 6..7: note = misc_feature - Xaa can be any naturally occurring amino acid
  SITE 9: note = misc_feature - Xaa can be any naturally occurring amino acid
  REGION 12..15: note = misc_feature - Xaa can be any naturally occurring amino acid
XXXXQXXPXLQXXXX

SEQ ID NO: 1025 - protein, 8 aa, synthetic construct
  REGION 1..8: note = epitope
QLVPQLQQ

SEQ ID NO: 1026 - protein, 7 aa, synthetic construct
  REGION 1..7: note = epitope
QLVPQLQ

SEQ ID NO: 1027 - protein, 6 aa, synthetic construct
  REGION 1..6: note = epitope
LVPQLQ

SEQ ID NO: 1028 - protein, 6 aa, synthetic construct
  REGION 1..6: note = epitope
  REGION 1..2: note = misc_feature - Xaa can be any naturally occurring amino acid
XXPQLQ

SEQ ID NO: 1029 - protein, 15 aa, synthetic construct
  REGION 1..15: note = epitope
  REGION 1..4: note = misc_feature - Xaa can be any naturally occurring amino acid
  REGION 6..7: note = misc_feature - Xaa can be any naturally occurring amino acid
  SITE 9: note = misc_feature - Xaa can be any naturally occurring amino acid
  SITE 12: note = misc_feature - Xaa can be any naturally occurring amino acid
XXXXQXXPXLQXPLS

SEQ ID NO: 1030 - protein, 15 aa, synthetic construct
  REGION 1..15: note = epitope
  REGION 1..4: note = misc_feature - Xaa can be any naturally occurring amino acid
  REGION 6..7: note = misc_feature - Xaa can be any naturally occurring amino acid
  SITE 9: note = misc_feature - Xaa can be any naturally occurring amino acid
  REGION 11..12: note = misc_feature - Xaa can be any naturally occurring amino acid
  SITE 15: note = misc_feature - Xaa can be any naturally occurring amino acid
XXXXQXXPXLXXPLX

SEQ ID NO: 1031 - protein, 15 aa, synthetic construct
  REGION 1..15: note = epitope
  REGION 1..7: note = misc_feature - Xaa can be any naturally occurring amino acid
  SITE 9: note = misc_feature - Xaa can be any naturally occurring amino acid
  REGION 11..12: note = misc_feature - Xaa can be any naturally occurring amino acid
  SITE 15: note = misc_feature - Xaa can be any naturally occurring amino acid
XXXXXXXPXLXXPLX

SEQ ID NO: 1032 - protein, 8 aa, synthetic construct
  REGION 1..8: note = epitope
QLVPQLQQ

SEQ ID NO: 1033 - protein, 8 aa, synthetic construct
  REGION 1..8: note = epitope
  REGION 2..3: note = misc_feature - Xaa can be any naturally occurring amino acid
  SITE 5: note = misc_feature - Xaa can be any naturally occurring amino acid
  SITE 8: note = misc_feature - Xaa can be any naturally occurring amino acid
QXXPXLQX

SEQ ID NO: 1034 - protein, 15 aa, synthetic construct
  REGION 1..15: note = epitope
  REGION 1..4: note = misc_feature - Xaa can be any naturally occurring amino acid
  SITE 6: note = misc_feature - Xaa can be any naturally occurring amino acid
  SITE 12: note = misc_feature - Xaa can be any naturally occurring amino acid
  SITE 14: note = misc_feature - Xaa can be any naturally occurring amino acid
XXXXQXVPQLQXPXS

SEQ ID NO: 1035 - protein, 15 aa, synthetic construct
  REGION 1..15: note = epitope
  REGION 1..4: note = misc_feature - Xaa can be any naturally occurring amino acid
  SITE 6: note = misc_feature - Xaa can be any naturally occurring amino acid
  REGION 12..15: note = misc_feature - Xaa can be any naturally occurring amino acid
XXXXQXVPQLQXXXX

SEQ ID NO: 1036 - protein, 15 aa, synthetic construct
  REGION 1..15: note = epitope
  REGION 1..4: note = misc_feature - Xaa can be any naturally occurring amino acid
  REGION 6..7: note = misc_feature - Xaa can be any naturally occurring amino acid
  SITE 9: note = misc_feature - Xaa can be any naturally occurring amino acid
  REGION 12..15: note = misc_feature - Xaa can be any naturally occurring amino acid
XXXXQXXPXLQXXXX

SEQ ID NO: 1037 - protein, 7 aa, synthetic construct
  REGION 1..7: note = epitope
QLVPQLQ

SEQ ID NO: 1038 - protein, 7 aa, synthetic construct
  REGION 1..7: note = epitope
  SITE 2: note = misc_feature - Xaa can be any naturally occurring amino acid
QXVPQLQ

SEQ ID NO: 1039 - protein, 7 aa, synthetic construct
  REGION 1..7: note = epitope
  REGION 2..3: note = misc_feature - Xaa can be any naturally occurring amino acid
  SITE 5: note = misc_feature - Xaa can be any naturally occurring amino acid
QXXPXLQ

SEQ ID NO: 1040 - protein, 15 aa, synthetic construct
  REGION 1..15: note = epitope
  REGION 1..2: note = misc_feature - Xaa can be any naturally occurring amino acid
  SITE 6: note = misc_feature - Xaa can be any naturally occurring amino acid
  REGION 8..9: note = misc_feature - Xaa can be any naturally occurring amino acid
XXQQQXVXXLQQPLS

SEQ ID NO: 1041 - protein, 15 aa, synthetic construct
  REGION 1..15: note = epitope
  REGION 1..6: note = misc_feature - Xaa can be any naturally occurring amino acid
  REGION 8..9: note = misc_feature - Xaa can be any naturally occurring amino acid
  REGION 12..13: note = misc_feature - Xaa can be any naturally occurring amino acid
XXXXXXVXXLQXXLS

SEQ ID NO: 1042 - protein, 9 aa, synthetic construct
  REGION 1..9: note = epitope
LVPQLQQPL

SEQ ID NO: 1043 - protein, 8 aa, synthetic construct
  REGION 1..8: note = epitope
VPQLQQPL

SEQ ID NO: 1044 - protein, 8 aa, synthetic construct
  REGION 1..8: note = epitope
  REGION 2..3: note = misc_feature - Xaa can be any naturally occurring amino acid
VXXLQQPL

SEQ ID NO: 1045 - protein, 8 aa, synthetic construct
  REGION 1..8: note = epitope
  REGION 2..3: note = misc_feature - Xaa can be any naturally occurring amino acid
  REGION 6..7: note = misc_feature - Xaa can be any naturally occurring amino acid
VXXLQXXL

SEQ ID NO: 1046 - protein, 5 aa, synthetic construct
  REGION 1..5: note = epitope
LQQPL

SEQ ID NO: 1047 - protein, 15 aa, synthetic construct
  REGION 1..15: note = epitope
  REGION 1..3: note = misc_feature - Xaa can be any naturally occurring amino acid
  REGION 6..8: note = misc_feature - Xaa can be any naturally occurring amino acid
  SITE 13: note = misc_feature - Xaa can be any naturally occurring amino acid
XXXQQXXXQLQQXLS

SEQ ID NO: 1048 - protein, 15 aa, synthetic construct
  REGION 1..15: note = epitope
  REGION 1..8: note = misc_feature - Xaa can be any naturally occurring amino acid
  SITE 13: note = misc_feature - Xaa can be any naturally occurring amino acid
XXXXXXXXQLQQXLS

SEQ ID NO: 1049 - protein, 9 aa, synthetic construct
  REGION 1..9: note = epitope
LVPQLQQPL

SEQ ID NO: 1050 - protein, 5 aa, synthetic construct
  REGION 1..5: note = epitope
LQQPL

SEQ ID NO: 1051 - protein, 5 aa, synthetic construct
  REGION 1..5: note = epitope
  SITE 4: note = misc_feature - Xaa can be any naturally occurring amino acid
LQQXL

SEQ ID NO: 1052 - protein, 15 aa, synthetic construct
  REGION 1..15: note = epitope
  SITE 4: note = misc_feature - Xaa can be any naturally occurring amino acid
  REGION 6..9: note = misc_feature - Xaa can be any naturally occurring amino acid
  REGION 11..12: note = misc_feature - Xaa can be any naturally occurring amino acid
WLQXQXXXXLXXPLS

SEQ ID NO: 1053 - protein, 15 aa, synthetic construct
  REGION 1..15: note = epitope
  REGION 3..4: note = misc_feature - Xaa can be any naturally occurring amino acid
  REGION 6..9: note = misc_feature - Xaa can be any naturally occurring amino acid
  REGION 11..12: note = misc_feature - Xaa can be any naturally occurring amino acid
WLXXQXXXXLXXPLS

SEQ ID NO: 1054 - protein, 15 aa, synthetic construct
  REGION 1..15: note = epitope
  REGION 3..4: note = misc_feature - Xaa can be any naturally occurring amino acid
  REGION 6..13: note = misc_feature - Xaa can be any naturally occurring amino acid
WLXXQXXXXXXXXLS

SEQ ID NO: 1055 - protein, 9 aa, synthetic construct
  REGION 1..9: note = epitope
LVPQLQQPL

SEQ ID NO: 1056 - protein, 8 aa, synthetic construct
  REGION 1..8: note = epitope
VPQLQQPL

SEQ ID NO: 1057 - protein, 15 aa, synthetic construct
  REGION 1..15: note = epitope
  SITE 1: note = misc_feature - Xaa can be any naturally occurring amino acid
  SITE 3: note = misc_feature - Xaa can be any naturally occurring amino acid
  SITE 6: note = misc_feature - Xaa can be any naturally occurring amino acid
  REGION 9..12: note = misc_feature - Xaa can be any naturally occurring amino acid
XLXQQXVPXXXXPLS

SEQ ID NO: 1058 - protein, 15 aa, synthetic construct
  REGION 1..15: note = epitope
  SITE 1: note = misc_feature - Xaa can be any naturally occurring amino acid
  REGION 3..4: note = misc_feature - Xaa can be any naturally occurring amino acid
  SITE 6: note = misc_feature - Xaa can be any naturally occurring amino acid
  REGION 9..12: note = misc_feature - Xaa can be any naturally occurring amino acid
  SITE 14: note = misc_feature - Xaa can be any naturally occurring amino acid
XLXXQXVPXXXXPXS

SEQ ID NO: 1059 - protein, 15 aa, synthetic construct
  REGION 1..15: note = epitope
  REGION 1..4: note = misc_feature - Xaa can be any naturally occurring amino acid
  SITE 6: note = misc_feature - Xaa can be any naturally occurring amino acid
  REGION 9..12: note = misc_feature - Xaa can be any naturally occurring amino acid
  SITE 14: note = misc_feature - Xaa can be any naturally occurring amino acid
XXXXQXVPXXXXPXS

SEQ ID NO: 1060 - protein, 8 aa, synthetic construct
  REGION 1..8: note = epitope
LQQQLVPQ

SEQ ID NO: 1061 - protein, 8 aa, synthetic construct
  REGION 1..8: note = epitope
  SITE 2: note = misc_feature - Xaa can be any naturally occurring amino acid
  SITE 5: note = misc_feature - Xaa can be any naturally occurring amino acid
  SITE 8: note = misc_feature - Xaa can be any naturally occurring amino acid
LXQQXVPX

SEQ ID NO: 1062 - protein, 8 aa, synthetic construct
  REGION 1..8: note = epitope
  REGION 2..3: note = misc_feature - Xaa can be any naturally occurring amino acid
  SITE 5: note = misc_feature - Xaa can be any naturally occurring amino acid
  SITE 8: note = misc_feature - Xaa can be any naturally occurring amino acid
LXXQXVPX

SEQ ID NO: 1063 - protein, 5 aa, synthetic construct
  REGION 1..5: note = epitope
LQQPL

SEQ ID NO: 1064 - protein, 8 aa, synthetic construct
  REGION 1..8: note = epitope
QLVPQLQQ

SEQ ID NO: 1065 - protein, 7 aa, synthetic construct
  REGION 1..7: note = epitope
QLVPQLQ

SEQ ID NO: 1066 - protein, 7 aa, synthetic construct
  REGION 1..7: note = epitope
  REGION 1..3: note = misc_feature - Xaa can be any naturally occurring amino acid
XXXPQLQ

SEQ ID NO: 1067 - protein, 15 aa, synthetic construct
  REGION 1..15: note = epitope
  REGION 1..3: note = misc_feature - Xaa can be any naturally occurring amino acid
  SITE 6: note = misc_feature - Xaa can be any naturally occurring amino acid
  SITE 12: note = misc_feature - Xaa can be any naturally occurring amino acid
  SITE 14: note = misc_feature - Xaa can be any naturally occurring amino acid
XXXQQXVPQLQXPXS

SEQ ID NO: 1068 - protein, 8 aa, synthetic construct
  REGION 1..8: note = epitope
QLVPQLQQ

SEQ ID NO: 1069 - protein, 7 aa, synthetic construct
  REGION 1..7: note = epitope
QLVPQLQ

SEQ ID NO: 1070 - protein, 7 aa, synthetic construct
  REGION 1..7: note = epitope
  SITE 2: note = misc_feature - Xaa can be any naturally occurring amino acid
QXVPQLQ

SEQ ID NO: 1071 - protein, 7 aa, synthetic construct
  REGION 1..7: note = epitope
  SITE 2: note = misc_feature - Xaa can be any naturally occurring amino acid
  SITE 5: note = misc_feature - Xaa can be any naturally occurring amino acid
QXVPXLQ

SEQ ID NO: 1072 - protein, 15 aa, synthetic construct
  REGION 1..15: note = epitope
  SITE 1: note = misc_feature - Xaa can be any naturally occurring amino acid
  REGION 3..4: note = misc_feature - Xaa can be any naturally occurring amino acid
  SITE 9: note = misc_feature - Xaa can be any naturally occurring amino acid
  SITE 12: note = misc_feature - Xaa can be any naturally occurring amino acid
  SITE 14: note = misc_feature - Xaa can be any naturally occurring amino acid
XLXXQLVPXLQXPXS

SEQ ID NO: 1073 - protein, 15 aa, synthetic construct
  REGION 1..15: note = epitope
  SITE 1: note = misc_feature - Xaa can be any naturally occurring amino acid
  REGION 3..4: note = misc_feature - Xaa can be any naturally occurring amino acid
  SITE 6: note = misc_feature - Xaa can be any naturally occurring amino acid
  SITE 9: note = misc_feature - Xaa can be any naturally occurring amino acid
  REGION 12..14: note = misc_feature - Xaa can be any naturally occurring amino acid
XLXXQXVPXLQXXXS

SEQ ID NO: 1074 - protein, 15 aa, synthetic construct
  REGION 1..15: note = epitope
  REGION 1..4: note = misc_feature - Xaa can be any naturally occurring amino acid
  SITE 6: note = misc_feature - Xaa can be any naturally occurring amino acid
  SITE 9: note = misc_feature - Xaa can be any naturally occurring amino acid
  REGION 12..15: note = misc_feature - Xaa can be any naturally occurring amino acid
XXXXQXVPXLQXXXX

SEQ ID NO: 1075 - protein, 10 aa, synthetic construct
  REGION 1..10: note = epitope
QLVPQLQQPL

SEQ ID NO: 1076 - protein, 9 aa, synthetic construct
  REGION 1..9: note = epitope
LVPQLQQPL

SEQ ID NO: 1077 - protein, 9 aa, synthetic construct
  REGION 1..9: note = epitope
  SITE 4: note = misc_feature - Xaa can be any naturally occurring amino acid
  SITE 7: note = misc_feature - Xaa can be any naturally occurring amino acid
  SITE 9: note = misc_feature - Xaa can be any naturally occurring amino acid
LVPXLQXPX

SEQ ID NO: 1078 - protein, 9 aa, synthetic construct
  REGION 1..9: note = epitope
  SITE 1: note = misc_feature - Xaa can be any naturally occurring amino acid
  SITE 4: note = misc_feature - Xaa can be any naturally occurring amino acid
  REGION 7..9: note = misc_feature - Xaa can be any naturally occurring amino acid
XVPXLQXXX

SEQ ID NO: 1079 - protein, 5 aa, synthetic construct
  REGION 1..5: note = epitope
LQQPL

SEQ ID NO: 1080 - protein, 7 aa, synthetic construct
  REGION 1..7: note = epitope
QLVPQLQ

SEQ ID NO: 1081 - protein, 7 aa, synthetic construct
  REGION 1..7: note = epitope
  SITE 2: note = misc_feature - Xaa can be any naturally occurring amino acid
QXVPQLQ

SEQ ID NO: 1082 - protein, 7 aa, synthetic construct
  REGION 1..7: note = epitope
  SITE 2: note = misc_feature - Xaa can be any naturally occurring amino acid
  SITE 5: note = misc_feature - Xaa can be any naturally occurring amino acid
QXVPXLQ

SEQ ID NO: 1083 - protein, 7 aa, synthetic construct
  REGION 1..7: note = epitope
  REGION 2..3: note = misc_feature - Xaa can be any naturally occurring amino acid
  SITE 5: note = misc_feature - Xaa can be any naturally occurring amino acid
QXXPXLQ

SEQ ID NO: 1084 - protein, 15 aa, synthetic construct
  REGION 1..15: note = epitope
  REGION 3..4: note = misc_feature - Xaa can be any naturally occurring amino acid
  REGION 6..9: note = misc_feature - Xaa can be any naturally occurring amino acid
  SITE 12: note = misc_feature - Xaa can be any naturally occurring amino acid
WLXXQXXXXLQXPLS

SEQ ID NO: 1085 - protein, 15 aa, synthetic construct
  REGION 1..15: note = epitope
  SITE 1: note = misc_feature - Xaa can be any naturally occurring amino acid
  REGION 3..4: note = misc_feature - Xaa can be any naturally occurring amino acid
  REGION 6..9: note = misc_feature - Xaa can be any naturally occurring amino acid
  REGION 11..12: note = misc_feature - Xaa can be any naturally occurring amino acid
XLXXQXXXXLXXPLS

SEQ ID NO: 1086 - protein, 15 aa, synthetic construct
  REGION 1..15: note = epitope
  REGION 1..9: note = misc_feature - Xaa can be any naturally occurring amino acid
  REGION 11..12: note = misc_feature - Xaa can be any naturally occurring amino acid
XXXXXXXXXLXXPLS

SEQ ID NO: 1087 - protein, 5 aa, synthetic construct
  REGION 1..5: note = epitope
LQQPL

SEQ ID NO: 1088 - protein, 5 aa, synthetic construct
  REGION 1..5: note = epitope
  SITE 3: note = misc_feature - Xaa can be any naturally occurring amino acid
LQXPL

SEQ ID NO: 1089 - protein, 15 aa, synthetic construct
  REGION 1..15: note = epitope
STKGGKPFVDILKAG

SEQ ID NO: 1090 - protein, 8 aa, synthetic construct
  REGION 1..8: note = epitope
STKGGKPF

SEQ ID NO: 1091 - protein, 6 aa, synthetic construct
  REGION 1..6: note = epitope
STKGGK

SEQ ID NO: 1092 - protein, 15 aa, synthetic construct
  REGION 1..15: note = epitope
  SITE 7: note = misc_feature - Xaa can be any naturally occurring amino acid
  REGION 10..11: note = misc_feature - Xaa can be any naturally occurring amino acid
  REGION 14..15: note = misc_feature - Xaa can be any naturally occurring amino acid
STKGGKXFVXXLKXX

SEQ ID NO: 1093 - protein, 15 aa, synthetic construct
  REGION 1..15: note = epitope
  REGION 1..2: note = misc_feature - Xaa can be any naturally occurring amino acid
  SITE 5: note = misc_feature - Xaa can be any naturally occurring amino acid
  SITE 7: note = misc_feature - Xaa can be any naturally occurring amino acid
  REGION 9..15: note = misc_feature - Xaa can be any naturally occurring amino acid
XXKGXKXFXXXXXXX

SEQ ID NO: 1094 - protein, 15 aa, synthetic construct
  REGION 1..15: note = epitope
  SITE 5: note = misc_feature - Xaa can be any naturally occurring amino acid
  REGION 7..15: note = misc_feature - Xaa can be any naturally occurring amino acid
STKGXKXXXXXXXXX

SEQ ID NO: 1095 - protein, 15 aa, synthetic construct
  REGION 1..15: note = epitope
  REGION 1..2: note = misc_feature - Xaa can be any naturally occurring amino acid
  SITE 15: note = misc_feature - Xaa can be any naturally occurring amino acid
XXKGGKPFVDILKAX

SEQ ID NO: 1096 - protein, 15 aa, synthetic construct
  REGION 1..15: note = epitope
  REGION 1..4: note = misc_feature - Xaa can be any naturally occurring amino acid
  SITE 7: note = misc_feature - Xaa can be any naturally occurring amino acid
  SITE 11: note = misc_feature - Xaa can be any naturally occurring amino acid
  REGION 14..15: note = misc_feature - Xaa can be any naturally occurring amino acid
XXXXGKXFVDXLKXX

SEQ ID NO: 1097 - protein, 15 aa, synthetic construct
  REGION 1..15: note = epitope
  SITE 1: note = misc_feature - Xaa can be any naturally occurring amino acid
  SITE 5: note = misc_feature - Xaa can be any naturally occurring amino acid
  REGION 9..11: note = misc_feature - Xaa can be any naturally occurring amino acid
  SITE 15: note = misc_feature - Xaa can be any naturally occurring amino acid
XTKGXKPFXXXLKAX

SEQ ID NO: 1098 - protein, 15 aa, synthetic construct
  REGION 1..15: note = epitope
  SITE 1: note = misc_feature - Xaa can be any naturally occurring amino acid
  SITE 5: note = misc_feature - Xaa can be any naturally occurring amino acid
  REGION 9..11: note = misc_feature - Xaa can be any naturally occurring amino acid
  REGION 13..15: note = misc_feature - Xaa can be any naturally occurring amino acid
XTKGXKPFXXXLXXX

SEQ ID NO: 1099 - protein, 15 aa, synthetic construct
  REGION 1..15: note = epitope
  REGION 1..2: note = misc_feature - Xaa can be any naturally occurring amino acid
  REGION 4..5: note = misc_feature - Xaa can be any naturally occurring amino acid
  REGION 8..11: note = misc_feature - Xaa can be any naturally occurring amino acid
  REGION 13..15: note = misc_feature - Xaa can be any naturally occurring amino acid
XXKXXKPXXXXLXXX

SEQ ID NO: 1100 - protein, 15 aa, synthetic construct
  REGION 1..15: note = epitope
  REGION 7..9: note = misc_feature - Xaa can be any naturally occurring amino acid
  SITE 11: note = misc_feature - Xaa can be any naturally occurring amino acid
  REGION 13..14: note = misc_feature - Xaa can be any naturally occurring amino acid
STKGGKXXXDXLXXG

SEQ ID NO: 1101 - protein, 4 aa, synthetic construct
  REGION 1..4: note = epitope
KGGK

SEQ ID NO: 1102 - protein, 9 aa, synthetic construct
  REGION 1..9: note = epitope
KPFVDILKA

SEQ ID NO: 1103 - protein, 15 aa, synthetic construct
  REGION 1..15: note = epitope
  SITE 1: note = misc_feature - Xaa can be any naturally occurring amino acid
  SITE 7: note = misc_feature - Xaa can be any naturally occurring amino acid
  REGION 10..11: note = misc_feature - Xaa can be any naturally occurring amino acid
  REGION 14..15: note = misc_feature - Xaa can be any naturally occurring amino acid
XTKGGKXFVXXLKXX

SEQ ID NO: 1104 - protein, 15 aa, synthetic construct
  REGION 1..15: note = epitope
  REGION 1..2: note = misc_feature - Xaa can be any naturally occurring amino acid
  SITE 7: note = misc_feature - Xaa can be any naturally occurring amino acid
  REGION 9..12: note = misc_feature - Xaa can be any naturally occurring amino acid
  REGION 14..15: note = misc_feature - Xaa can be any naturally occurring amino acid
XXKGGKXFXXXXKXX

SEQ ID NO: 1105 - protein, 15 aa, synthetic construct
  REGION 1..15: note = epitope
  REGION 1..2: note = misc_feature - Xaa can be any naturally occurring amino acid
  SITE 7: note = misc_feature - Xaa can be any naturally occurring amino acid
  REGION 9..12: note = misc_feature - Xaa can be any naturally occurring amino acid
  REGION 14..15: note = misc_feature - Xaa can be any naturally occurring amino acid
XXKGGKXFXXXXKXX

SEQ ID NO: 1106 - protein, 15 aa, synthetic construct
  REGION 1..15: note = epitope
  SITE 2: note = misc_feature - Xaa can be any naturally occurring amino acid
  REGION 5..6: note = misc_feature - Xaa can be any naturally occurring amino acid
SXKGXXPFVDILKAG

SEQ ID NO: 1107 - protein, 15 aa, synthetic construct
  REGION 1..15: note = epitope
  REGION 1..2: note = misc_feature - Xaa can be any naturally occurring amino acid
  REGION 4..6: note = misc_feature - Xaa can be any naturally occurring amino acid
XXKXXXPFVDILKAG

SEQ ID NO: 1108 - protein, 4 aa, synthetic construct
  REGION 1..4: note = epitope
KGGK

SEQ ID NO: 1109 - protein, 15 aa, synthetic construct
  REGION 1..15: note = epitope
  REGION 6..10: note = misc_feature - Xaa can be any naturally occurring amino acid
STKGGXXXXXILKAG

SEQ ID NO: 1110 - protein, 15 aa, synthetic construct
  REGION 1..15: note = epitope
  SITE 1: note = misc_feature - Xaa can be any naturally occurring amino acid
  REGION 5..11: note = misc_feature - Xaa can be any naturally occurring amino acid
XTKGXXXXXXXLKAG

SEQ ID NO: 1111 - protein, 15 aa, synthetic construct
  REGION 1..15: note = epitope
  SITE 1: note = misc_feature - Xaa can be any naturally occurring amino acid
  REGION 5..12: note = misc_feature - Xaa can be any naturally occurring amino acid
  REGION 14..15: note = misc_feature - Xaa can be any naturally occurring amino acid
XTKGXXXXXXXXKXX

SEQ ID NO: 1112 - protein, 6 aa, synthetic construct
  REGION 1..6: note = epitope
STKGGK

SEQ ID NO: 1113 - protein, 10 aa, synthetic construct
  REGION 1..10: note = epitope
KGGKPFVDIL

SEQ ID NO: 1114 - protein, 10 aa, synthetic construct
  REGION 1..10: note = epitope
  REGION 4..8: note = misc_feature - Xaa can be any naturally occurring amino acid
KGGXXXXXIL

SEQ ID NO: 1115 - protein, 10 aa, synthetic construct
  REGION 1..10: note = epitope
  REGION 4..9: note = misc_feature - Xaa can be any naturally occurring amino acid
KGGXXXXXXL

SEQ ID NO: 1116 - protein, 15 aa, synthetic construct
  REGION 1..15: note = epitope
  SITE 5: note = misc_feature - Xaa can be any naturally occurring amino acid
  SITE 12: note = misc_feature - Xaa can be any naturally occurring amino acid
STKGXKPFVDIXKAG

SEQ ID NO: 1117 - protein, 15 aa, synthetic construct
  REGION 1..15: note = epitope
  SITE 5: note = misc_feature - Xaa can be any naturally occurring amino acid
  SITE 12: note = misc_feature - Xaa can be any naturally occurring amino acid
  SITE 15: note = misc_feature - Xaa can be any naturally occurring amino acid
STKGXKPFVDIXKAX

SEQ ID NO: 1118 - protein, 15 aa, synthetic construct
  REGION 1..15: note = epitope
  SITE 5: note = misc_feature - Xaa can be any naturally occurring amino acid
  REGION 11..12: note = misc_feature - Xaa can be any naturally occurring amino acid
  SITE 15: note = misc_feature - Xaa can be any naturally occurring amino acid
STKGXKPFVDXXKAX

SEQ ID NO: 1119 - protein, 5 aa, synthetic construct
  REGION 1..5: note = epitope
TKGGK

SEQ ID NO: 1120 - protein, 5 aa, synthetic construct
  REGION 1..5: note = epitope
  SITE 4: note = misc_feature - Xaa can be any naturally occurring amino acid
TKGXK

SEQ ID NO: 1121 - protein, 10 aa, synthetic construct
  REGION 1..10: note = epitope
GGKPFVDILK

SEQ ID NO: 1122 - protein, 9 aa, synthetic construct
  REGION 1..9: note = epitope
GKPFVDILK

SEQ ID NO: 1123 - protein, 9 aa, synthetic construct
  REGION 1..9: note = epitope
  SITE 1: note = misc_feature - Xaa can be any naturally occurring amino acid
  SITE 8: note = misc_feature - Xaa can be any naturally occurring amino acid
XKPFVDIXK

SEQ ID NO: 1124 - protein, 9 aa, synthetic construct
  REGION 1..9: note = epitope
  SITE 1: note = misc_feature - Xaa can be any naturally occurring amino acid
  REGION 7..8: note = misc_feature - Xaa can be any naturally occurring amino acid
XKPFVDXXK

SEQ ID NO: 1125 - protein, 15 aa, synthetic construct
  REGION 1..15: note = epitope
  REGION 4..7: note = misc_feature - Xaa can be any naturally occurring amino acid
  REGION 9..15: note = misc_feature - Xaa can be any naturally occurring amino acid
STKXXXXFXXXXXXX

SEQ ID NO: 1126 - protein, 5 aa, synthetic construct
  REGION 1..5: note = epitope
TKGGK

SEQ ID NO: 1127 - protein, 15 aa, synthetic construct
  REGION 1..15: note = epitope
  SITE 1: note = misc_feature - Xaa can be any naturally occurring amino acid
  REGION 14..15: note = misc_feature - Xaa can be any naturally occurring amino acid
XTKGGKPFVDILKXX

SEQ ID NO: 1128 - protein, 15 aa, synthetic construct
  REGION 1..15: note = epitope
  REGION 1..2: note = misc_feature - Xaa can be any naturally occurring amino acid
  SITE 10: note = misc_feature - Xaa can be any naturally occurring amino acid
  SITE 15: note = misc_feature - Xaa can be any naturally occurring amino acid
XXKGGKPFVXILKAX

SEQ ID NO: 1129 - protein, 15 aa, synthetic construct
  REGION 1..15: note = epitope
  REGION 1..2: note = misc_feature - Xaa can be any naturally occurring amino acid
  REGION 4..5: note = misc_feature - Xaa can be any naturally occurring amino acid
  SITE 7: note = misc_feature - Xaa can be any naturally occurring amino acid
  REGION 9..11: note = misc_feature - Xaa can be any naturally occurring amino acid
  SITE 15: note = misc_feature - Xaa can be any naturally occurring amino acid
XXKXXKXFXXXLKAX

SEQ ID NO: 1130 - protein, 15 aa, synthetic construct
  REGION 1..15: note = epitope
  REGION 1..5: note = misc_feature - Xaa can be any naturally occurring amino acid
  SITE 7: note = misc_feature - Xaa can be any naturally occurring amino acid
  REGION 9..11: note = misc_feature - Xaa can be any naturally occurring amino acid
  SITE 15: note = misc_feature - Xaa can be any naturally occurring amino acid
XXXXXKXFXXXLKAX

SEQ ID NO: 1131 - protein, 6 aa, synthetic construct
  REGION 1..6: note = epitope
KPFVDI

SEQ ID NO: 1132 - protein, 6 aa, synthetic construct
  REGION 1..6: note = epitope
  SITE 5: note = misc_feature - Xaa can be any naturally occurring amino acid
KPFVXI

SEQ ID NO: 1133 - protein, 15 aa, synthetic construct
  REGION 1..15: note = epitope
  REGION 1..2: note = misc_feature - Xaa can be any naturally occurring amino acid
  SITE 5: note = misc_feature - Xaa can be any naturally occurring amino acid
  SITE 7: note = misc_feature - Xaa can be any naturally occurring amino acid
  SITE 11: note = misc_feature - Xaa can be any naturally occurring amino acid
  REGION 13..14: note = misc_feature - Xaa can be any naturally occurring amino acid
XXKGXKXFVDXLXXG

SEQ ID NO: 1134 - protein, 7 aa, synthetic construct
  REGION 1..7: note = epitope
STKGGKP

SEQ ID NO: 1135 - protein, 10 aa, synthetic construct
  REGION 1..10: note = epitope
KGGKPFVDIL

SEQ ID NO: 1136 - protein, 10 aa, synthetic construct
  REGION 1..10: note = epitope
GKPFVDILKA

SEQ ID NO: 1137 - protein, 15 aa, synthetic construct
  REGION 1..15: note = epitope
  REGION 1..4: note = misc_feature - Xaa can be any naturally occurring amino acid
  REGION 6..7: note = misc_feature - Xaa can be any naturally occurring amino acid
  SITE 9: note = misc_feature - Xaa can be any naturally occurring amino acid
  SITE 11: note = misc_feature - Xaa can be any naturally occurring amino acid
  REGION 13..15: note = misc_feature - Xaa can be any naturally occurring amino acid
XXXXGXXFXDXLXXX

SEQ ID NO: 1138 - protein, 15 aa, synthetic construct
  REGION 1..15: note = epitope
  REGION 6..8: note = misc_feature - Xaa can be any naturally occurring amino acid
  SITE 11: note = misc_feature - Xaa can be any naturally occurring amino acid
  REGION 13..15: note = misc_feature - Xaa can be any naturally occurring amino acid
STKGGXXXVDXLXXX

SEQ ID NO: 1139 - protein, 15 aa, synthetic construct
  REGION 1..15: note = epitope
  REGION 1..2: note = misc_feature - Xaa can be any naturally occurring amino acid
  REGION 6..8: note = misc_feature - Xaa can be any naturally occurring amino acid
  REGION 11..15: note = misc_feature - Xaa can be any naturally occurring amino acid
XXKGGXXXVDXXXXX

SEQ ID NO: 1140 - protein, 4 aa, synthetic construct
  REGION 1..4: note = epitope
KGGK

SEQ ID NO: 1141 - protein, 7 aa, synthetic construct
  REGION 1..7: note = epitope
GGKPFVD

SEQ ID NO: 1142 - protein, 15 aa, synthetic construct
  REGION 1..15: note = epitope
TEPSQLSIDQNAQGL

SEQ ID NO: 1143 - protein, 15 aa, synthetic construct
  REGION 1..15: note = epitope
  REGION 1..4: note = misc_feature - Xaa can be any naturally occurring amino acid
  SITE 7: note = misc_feature - Xaa can be any naturally occurring amino acid
  REGION 12..15: note = misc_feature - Xaa can be any naturally occurring amino acid
XXXXQLXIDQNXXXX

SEQ ID NO: 1144 - protein, 15 aa, synthetic construct
  REGION 1..15: note = epitope
  REGION 1..4: note = misc_feature - Xaa can be any naturally occurring amino acid
  REGION 6..8: note = misc_feature - Xaa can be any naturally occurring amino acid
  REGION 12..15: note = misc_feature - Xaa can be any naturally occurring amino acid
XXXXQXXXDQNXXXX

SEQ ID NO: 1145 - protein, 7 aa, synthetic construct
  REGION 1..7: note = epitope
QLSIDQN

SEQ ID NO: 1146 - protein, 7 aa, synthetic construct
  REGION 1..7: note = epitope
  SITE 3: note = misc_feature - Xaa can be any naturally occurring amino acid
QLXIDQN

SEQ ID NO: 1147 - protein, 7 aa, synthetic construct
  REGION 1..7: note = epitope
  REGION 2..4: note = misc_feature - Xaa can be any naturally occurring amino acid
QXXXDQN

SEQ ID NO: 1148 - protein, 15 aa, synthetic construct
  REGION 1..15: note = epitope
  REGION 3..5: note = misc_feature - Xaa can be any naturally occurring amino acid
  REGION 12..15: note = misc_feature - Xaa can be any naturally occurring amino acid
TEXXXLSIDQNXXXX

SEQ ID NO: 1149 - protein, 4 aa, synthetic construct
  REGION 1..4: note = epitope
PSQL

SEQ ID NO: 1150 - protein, 10 aa, synthetic construct
  REGION 1..10: note = epitope
TEPSQLSIDQ

SEQ ID NO: 1151 - protein, 9 aa, synthetic construct
  REGION 1..9: note = epitope
SQLSIDQNA

SEQ ID NO: 1152 - protein, 10 aa, synthetic construct
  REGION 1..10: note = epitope
LSIDQNAQGL

SEQ ID NO: 1153 - protein, 15 aa, synthetic construct
  REGION 1..15: note = epitope
  REGION 12..15: note = misc_feature - Xaa can be any naturally occurring amino acid
TEPSQLSIDQNXXXX

SEQ ID NO: 1154 - protein, 5 aa, synthetic construct
  REGION 1..5: note = epitope
QGLAR

SEQ ID NO: 1155 - protein, 15 aa, synthetic construct
  REGION 1..15: note = epitope
  SITE 4: note = misc_feature - Xaa can be any naturally occurring amino acid
  SITE 6: note = misc_feature - Xaa can be any naturally occurring amino acid
  REGION 11..15: note = misc_feature - Xaa can be any naturally occurring amino acid
TEPXQXSIDQXXXXX

SEQ ID NO: 1156 - protein, 10 aa, synthetic construct
  REGION 1..10: note = epitope
TEPSQLSIDQ

SEQ ID NO: 1157 - protein, 6 aa, synthetic construct
  REGION 1..6: note = epitope
TEPSQL

SEQ ID NO: 1158 - protein, 6 aa, synthetic construct
  REGION 1..6: note = epitope
  SITE 4: note = misc_feature - Xaa can be any naturally occurring amino acid
  SITE 6: note = misc_feature - Xaa can be any naturally occurring amino acid
TEPXQX

SEQ ID NO: 1159 - protein, 15 aa, synthetic construct
  REGION 1..15: note = epitope
  SITE 10: note = misc_feature - Xaa can be any naturally occurring amino acid
  SITE 13: note = misc_feature - Xaa can be any naturally occurring amino acid
TEPSQLSIDXNAXGL

SEQ ID NO: 1160 - protein, 15 aa, synthetic construct
  REGION 1..15: note = epitope
  SITE 8: note = misc_feature - Xaa can be any naturally occurring amino acid
  SITE 10: note = misc_feature - Xaa can be any naturally occurring amino acid
  SITE 13: note = misc_feature - Xaa can be any naturally occurring amino acid
TEPSQLSXDXNAXGL

SEQ ID NO: 1161 - protein, 15 aa, synthetic construct
  REGION 1..15: note = epitope
  SITE 2: note = misc_feature - Xaa can be any naturally occurring amino acid
  SITE 4: note = misc_feature - Xaa can be any naturally occurring amino acid
  SITE 8: note = misc_feature - Xaa can be any naturally occurring amino acid
  SITE 10: note = misc_feature - Xaa can be any naturally occurring amino acid
  REGION 13..14: note = misc_feature - Xaa can be any naturally occurring amino acid
TXPXQLSXDXNAXXL

SEQ ID NO: 1162 - protein, 8 aa, synthetic construct
  REGION 1..8: note = epitope
SIDQNAQG

SEQ ID NO: 1163 - protein, 8 aa, synthetic construct
  REGION 1..8: note = epitope
  SITE 4: note = misc_feature - Xaa can be any naturally occurring amino acid
  SITE 7: note = misc_feature - Xaa can be any naturally occurring amino acid
SIDXNAXG

SEQ ID NO: 1164 - protein, 8 aa, synthetic construct
  REGION 1..8: note = epitope
  SITE 2: note = misc_feature - Xaa can be any naturally occurring amino acid
  SITE 4: note = misc_feature - Xaa can be any naturally occurring amino acid
  SITE 7: note = misc_feature - Xaa can be any naturally occurring amino acid
SXDXNAXG

SEQ ID NO: 1165 - protein, 8 aa, synthetic construct
  REGION 1..8: note = epitope
  SITE 2: note = misc_feature - Xaa can be any naturally occurring amino acid
  SITE 4: note = misc_feature - Xaa can be any naturally occurring amino acid
  REGION 7..8: note = misc_feature - Xaa can be any naturally occurring amino acid
SXDXNAXX

SEQ ID NO: 1166 - protein, 15 aa, synthetic construct
  REGION 1..15: note = epitope
PGQQQQFPPQQPYPQ

SEQ ID NO: 1167 - protein, 15 aa, synthetic construct
  REGION 1..15: note = epitope
  SITE 2: note = misc_feature - Xaa can be any naturally occurring amino acid
  REGION 6..14: note = misc_feature - Xaa can be any naturally occurring amino acid
PXQQQXXXXXXXXXQ

SEQ ID NO: 1168 - protein, 10 aa, synthetic construct
  REGION 1..10: note = epitope
PGQQQQFPPQ

SEQ ID NO: 1169 - protein, 10 aa, synthetic construct
  REGION 1..10: note = epitope
  SITE 2: note = misc_feature - Xaa can be any naturally occurring amino acid
  REGION 6..10: note = misc_feature - Xaa can be any naturally occurring amino acid
PXQQQXXXXX

SEQ ID NO: 1170 - protein, 6 aa, synthetic construct
  REGION 1..6: note = epitope
FPPQQP

SEQ ID NO: 1171 - protein, 15 aa, synthetic construct
  REGION 1..15: note = epitope
  SITE 2: note = misc_feature - Xaa can be any naturally occurring amino acid
  SITE 4: note = misc_feature - Xaa can be any naturally occurring amino acid
  REGION 6..9: note = misc_feature - Xaa can be any naturally occurring amino acid
  SITE 12: note = misc_feature - Xaa can be any naturally occurring amino acid
  SITE 15: note = misc_feature - Xaa can be any naturally occurring amino acid
PXQXQXXXXQQXYPX

SEQ ID NO: 1172 - protein, 15 aa, synthetic construct
  REGION 1..15: note = epitope
  REGION 2..4: note = misc_feature - Xaa can be any naturally occurring amino acid
  REGION 6..10: note = misc_feature - Xaa can be any naturally occurring amino acid
  SITE 12: note = misc_feature - Xaa can be any naturally occurring amino acid
  REGION 14..15: note = misc_feature - Xaa can be any naturally occurring amino acid
PXXXQXXXXXQXYXX

SEQ ID NO: 1173 - protein, 10 aa, synthetic construct
  REGION 1..10: note = epitope
QQQQFPPQQP

SEQ ID NO: 1174 - protein, 10 aa, synthetic construct
  REGION 1..10: note = epitope
  SITE 2: note = misc_feature - Xaa can be any naturally occurring amino acid
  REGION 4..7: note = misc_feature - Xaa can be any naturally occurring amino acid
  SITE 10: note = misc_feature - Xaa can be any naturally occurring amino acid
QXQXXXXQQX

SEQ ID NO: 1175 - protein, 9 aa, synthetic construct
  REGION 1..9: note = epitope
QQQFPPQQP

SEQ ID NO: 1176 - protein, 7 aa, synthetic construct
  REGION 1..7: note = epitope
QQFPPQQ

SEQ ID NO: 1177 - protein, 6 aa, synthetic construct
  REGION 1..6: note = epitope
QQFPPQ

SEQ ID NO: 1178 - protein, 15 aa, synthetic construct
  REGION 1..15: note = epitope
  REGION 1..2: note = misc_feature - Xaa can be any naturally occurring amino acid
  REGION 6..7: note = misc_feature - Xaa can be any naturally occurring amino acid
  REGION 9..15: note = misc_feature - Xaa can be any naturally occurring amino acid
XXQQQXXPXXXXXXX

SEQ ID NO: 1179 - protein, 7 aa, synthetic construct
  REGION 1..7: note = epitope
QQFPPQQ

SEQ ID NO: 1180 - protein, 5 aa, synthetic construct
  REGION 1..5: note = epitope
QQFPP

SEQ ID NO: 1181 - protein, 15 aa, synthetic construct
  REGION 1..15: note = epitope
  REGION 6..9: note = misc_feature - Xaa can be any naturally occurring amino acid
  REGION 12..15: note = misc_feature - Xaa can be any naturally occurring amino acid
PGQQQXXXXQQXXXX

SEQ ID NO: 1182 - protein, 15 aa, synthetic construct
  REGION 1..15: note = epitope
  REGION 1..2: note = misc_feature - Xaa can be any naturally occurring amino acid
  REGION 6..10: note = misc_feature - Xaa can be any naturally occurring amino acid
  REGION 12..15: note = misc_feature - Xaa can be any naturally occurring amino acid
XXQQQXXXXXQXXXX

SEQ ID NO: 1183 - protein, 7 aa, synthetic construct
  REGION 1..7: note = epitope
QQFPPQQ

SEQ ID NO: 1184 - protein, 15 aa, synthetic construct
  REGION 1..15: note = epitope
  REGION 1..3: note = misc_feature - Xaa can be any naturally occurring amino acid
  REGION 6..10: note = misc_feature - Xaa can be any naturally occurring amino acid
  REGION 13..15: note = misc_feature - Xaa can be any naturally occurring amino acid
XXXQQXXXXXQPXXX

SEQ ID NO: 1185 - protein, 8 aa, synthetic construct
  REGION 1..8: note = epitope
QQFPPQQP

SEQ ID NO: 1186 - protein, 15 aa, synthetic construct
  REGION 1..15: note = epitope
  REGION 2..3: note = misc_feature - Xaa can be any naturally occurring amino acid
  REGION 7..10: note = misc_feature - Xaa can be any naturally occurring amino acid
  REGION 12..15: note = misc_feature - Xaa can be any naturally occurring amino acid
PXXQQQXXXXQXXXX

SEQ ID NO: 1187 - protein, 9 aa, synthetic construct
  REGION 1..9: note = epitope
QQQQFPPQQ

SEQ ID NO: 1188 - protein, 7 aa, synthetic construct
  REGION 1..7: note = epitope
QQFPPQQ

SEQ ID NO: 1189 - protein, 6 aa, synthetic construct
  REGION 1..6: note = epitope
QQFPPQ

SEQ ID NO: 1190 - protein, 10 aa, synthetic construct
  REGION 1..10: note = epitope
QQFPPQQPYP

SEQ ID NO: 1191 - protein, 15 aa, synthetic construct
  REGION 1..15: note = epitope
  SITE 3: note = misc_feature - Xaa can be any naturally occurring amino acid
  REGION 6..9: note = misc_feature - Xaa can be any naturally occurring amino acid
  SITE 11: note = misc_feature - Xaa can be any naturally occurring amino acid
  REGION 14..15: note = misc_feature - Xaa can be any naturally occurring amino acid
PGXQQXXXXQXPYXX

SEQ ID NO: 1192 - protein, 15 aa, synthetic construct
  REGION 1..15: note = epitope
  SITE 3: note = misc_feature - Xaa can be any naturally occurring amino acid
  REGION 6..9: note = misc_feature - Xaa can be any naturally occurring amino acid
  REGION 11..12: note = misc_feature - Xaa can be any naturally occurring amino acid
  REGION 14..15: note = misc_feature - Xaa can be any naturally occurring amino acid
PGXQQXXXXQXXYXX

SEQ ID NO: 1193 - protein, 15 aa, synthetic construct
  REGION 1..15: note = epitope
  SITE 3: note = misc_feature - Xaa can be any naturally occurring amino acid
  REGION 6..12: note = misc_feature - Xaa can be any naturally occurring amino acid
  REGION 14..15: note = misc_feature - Xaa can be any naturally occurring amino acid
PGXQQXXXXXXXYXX

SEQ ID NO: 1194 - protein, 8 aa, synthetic construct
  REGION 1..8: note = epitope
QQQQFPPQ

SEQ ID NO: 1195 - protein, 10 aa, synthetic construct
  REGION 1..10: note = epitope
QFPPQQPYPQ

SEQ ID NO: 1196 - protein, 15 aa, synthetic construct
  REGION 1..15: note = epitope
  REGION 6..15: note = misc_feature - Xaa can be any naturally occurring amino acid
PGQQQXXXXXXXXXX

SEQ ID NO: 1197 - protein, 15 aa, synthetic construct
  REGION 1..15: note = epitope
  SITE 2: note = misc_feature - Xaa can be any naturally occurring amino acid
  REGION 6..15: note = misc_feature - Xaa can be any naturally occurring amino acid
PXQQQXXXXXXXXXX

SEQ ID NO: 1198 - protein, 15 aa, synthetic construct
  REGION 1..15: note = epitope
  SITE 7: note = misc_feature - Xaa can be any naturally occurring amino acid
PGQQQQXPPQQPYPQ

SEQ ID NO: 1199 - protein, 15 aa, synthetic construct
  REGION 1..15: note = epitope
  REGION 7..8: note = misc_feature - Xaa can be any naturally occurring amino acid
PGQQQQXXPQQPYPQ

SEQ ID NO: 1200 - protein, 9 aa, synthetic construct
  REGION 1..9: note = epitope
QQFPGQQQQ

SEQ ID NO: 1201 - protein, 15 aa, synthetic construct
  REGION 1..15: note = epitope
  REGION 7..9: note = misc_feature - Xaa can be any naturally occurring amino acid
  REGION 11..15: note = misc_feature - Xaa can be any naturally occurring amino acid
PGQQQQXXXQXXXXX

SEQ ID NO: 1202 - protein, 15 aa, synthetic construct
  REGION 1..15: note = epitope
  SITE 4: note = misc_feature - Xaa can be any naturally occurring amino acid
  REGION 6..15: note = misc_feature - Xaa can be any naturally occurring amino acid
PGQXQXXXXXXXXXX

SEQ ID NO: 1203 - protein, 15 aa, synthetic construct
  REGION 1..15: note = epitope
  REGION 3..4: note = misc_feature - Xaa can be any naturally occurring amino acid
  REGION 6..7: note = misc_feature - Xaa can be any naturally occurring amino acid
  REGION 10..14: note = misc_feature - Xaa can be any naturally occurring amino acid
PGXXQXXPPXXXXXQ

SEQ ID NO: 1204 - protein, 15 aa, synthetic construct
  REGION 1..15: note = epitope
  SITE 1: note = misc_feature - Xaa can be any naturally occurring amino acid
  REGION 3..4: note = misc_feature - Xaa can be any naturally occurring amino acid
  REGION 6..7: note = misc_feature - Xaa can be any naturally occurring amino acid
  REGION 10..14: note = misc_feature - Xaa can be any naturally occurring amino acid
XGXXQXXPPXXXXXQ

SEQ ID NO: 1205 - protein, 10 aa, synthetic construct
  REGION 1..10: note = epitope
QQQQFPPQQP

SEQ ID NO: 1206 - protein, 8 aa, synthetic construct
  REGION 1..8: note = epitope
QQFPPQQP

SEQ ID NO: 1207 - protein, 5 aa, synthetic construct
  REGION 1..5: note = epitope
FPPQQ

SEQ ID NO: 1208 - protein, 7 aa, synthetic construct
  REGION 1..7: note = epitope
QQFPPQQ

SEQ ID NO: 1209 - protein, 15 aa, synthetic construct
  REGION 1..15: note = epitope
PIQQQPQPFPQQPPC

SEQ ID NO: 1210 - protein, 6 aa, synthetic construct
  REGION 1..6: note = epitope
PIQQQP

SEQ ID NO: 1211 - protein, 6 aa, synthetic construct
  REGION 1..6: note = epitope
  REGION 5..6: note = misc_feature - Xaa can be any naturally occurring amino acid
PIQQXX

SEQ ID NO: 1212 - protein, 15 aa, synthetic construct
  REGION 1..15: note = epitope
  REGION 1..5: note = misc_feature - Xaa can be any naturally occurring amino acid
  SITE 8: note = misc_feature - Xaa can be any naturally occurring amino acid
  SITE 13: note = misc_feature - Xaa can be any naturally occurring amino acid
  SITE 15: note = misc_feature - Xaa can be any naturally occurring amino acid
XXXXXPQXFPQQXPX

SEQ ID NO: 1213 - protein, 10 aa, synthetic construct
  REGION 1..10: note = epitope
PIQQQPQPFP

SEQ ID NO: 1214 - protein, 10 aa, synthetic construct
  REGION 1..10: note = epitope
  REGION 1..5: note = misc_feature - Xaa can be any naturally occurring amino acid
  SITE 8: note = misc_feature - Xaa can be any naturally occurring amino acid
XXXXXPQXFP

SEQ ID NO: 1215 - protein, 6 aa, synthetic construct
  REGION 1..6: note = epitope
PQQPPC

SEQ ID NO: 1216 - protein, 5 aa, synthetic construct
  REGION 1..5: note = epitope
PQQPP

SEQ ID NO: 1217 - protein, 5 aa, synthetic construct
  REGION 1..5: note = epitope
  SITE 4: note = misc_feature - Xaa can be any naturally occurring amino acid
PQQXP

SEQ ID NO: 1218 - protein, 6 aa, synthetic construct
  REGION 1..6: note = epitope
PIQQQP

SEQ ID NO: 1219 - protein, 6 aa, synthetic construct
  REGION 1..6: note = epitope
  REGION 5..6: note = misc_feature - Xaa can be any naturally occurring amino acid
PIQQXX

SEQ ID NO: 1220 - protein, 5 aa, synthetic construct
  REGION 1..5: note = epitope
IQQQP

SEQ ID NO: 1221 - protein, 9 aa, synthetic construct
  REGION 1..9: note = epitope
PIQQQPQPF

SEQ ID NO: 1222 - protein, 9 aa, synthetic construct
  REGION 1..9: note = epitope
  REGION 5..9: note = misc_feature - Xaa can be any naturally occurring amino acid
PIQQXXXXX

SEQ ID NO: 1223 - protein, 5 aa, synthetic construct
  REGION 1..5: note = epitope
IQQQP

SEQ ID NO: 1224 - protein, 10 aa, synthetic construct
  REGION 1..10: note = epitope
PIQQQPQPFP

SEQ ID NO: 1225 - protein, 8 aa, synthetic construct
  REGION 1..8: note = epitope
QQPIQQQP

SEQ ID NO: 1226 - protein, 6 aa, synthetic construct
  REGION 1..6: note = epitope
PIQQQP

SEQ ID NO: 1227 - protein, 6 aa, synthetic construct
  REGION 1..6: note = epitope
PQQPPC

SEQ ID NO: 1228 - protein, 10 aa, synthetic construct
  REGION 1..10: note = epitope
PIQQQPQPFP

SEQ ID NO: 1229 - protein, 6 aa, synthetic construct
  REGION 1..6: note = epitope
PIQQQP

SEQ ID NO: 1230 - protein, 6 aa, synthetic construct
  REGION 1..6: note = epitope
  REGION 5..6: note = misc_feature - Xaa can be any naturally occurring amino acid
PIQQXX

SEQ ID NO: 1231 - protein, 5 aa, synthetic construct
  REGION 1..5: note = epitope
PQQPP

SEQ ID NO: 1232 - protein, 15 aa, synthetic construct
  REGION 1..15: note = epitope
  SITE 1: note = misc_feature - Xaa can be any naturally occurring amino acid
  REGION 4..9: note = misc_feature - Xaa can be any naturally occurring amino acid
  REGION 13..15: note = misc_feature - Xaa can be any naturally occurring amino acid
XIQXXXXXXPQQXXX

SEQ ID NO: 1233 - protein, 15 aa, synthetic construct
  REGION 1..15: note = epitope
  SITE 1: note = misc_feature - Xaa can be any naturally occurring amino acid
  REGION 3..9: note = misc_feature - Xaa can be any naturally occurring amino acid
  REGION 13..15: note = misc_feature - Xaa can be any naturally occurring amino acid
XIXXXXXXXPQQXXX

SEQ ID NO: 1234 - protein, 5 aa, synthetic construct
  REGION 1..5: note = epitope
PQQPP

SEQ ID NO: 1235 - protein, 5 aa, synthetic construct
  REGION 1..5: note = epitope
PQQPP

SEQ ID NO: 1236 - protein, 5 aa, synthetic construct
  REGION 1..5: note = epitope
PQQPP

SEQ ID NO: 1237 - protein, 15 aa, synthetic construct
  REGION 1..15: note = epitope
  SITE 2: note = misc_feature - Xaa can be any naturally occurring amino acid
PXQQQPQPFPQQPPC

SEQ ID NO: 1238 - protein, 15 aa, synthetic construct
  REGION 1..15: note = epitope
  SITE 2: note = misc_feature - Xaa can be any naturally occurring amino acid
  SITE 12: note = misc_feature - Xaa can be any naturally occurring amino acid
PXQQQPQPFPQXPPC

SEQ ID NO: 1239 - protein, 9 aa, synthetic construct
  REGION 1..9: note = epitope
QQQPIQQQP

SEQ ID NO: 1240 - protein, 9 aa, synthetic construct
  REGION 1..9: note = epitope
  SITE 5: note = misc_feature - Xaa can be any naturally occurring amino acid
QQQPXQQQP

SEQ ID NO: 1241 - protein, 6 aa, synthetic construct
  REGION 1..6: note = epitope
PIQQQP

SEQ ID NO: 1242 - protein, 6 aa, synthetic construct
  REGION 1..6: note = epitope
PQQPPC

SEQ ID NO: 1243 - protein, 5 aa, synthetic construct
  REGION 1..5: note = epitope
PQQPP

SEQ ID NO: 1244 - protein, 6 aa, synthetic construct
  REGION 1..6: note = epitope
PIQQQP

SEQ ID NO: 1245 - protein, 6 aa, synthetic construct
  REGION 1..6: note = epitope
PQQPPC

SEQ ID NO: 1246 - protein, 5 aa, synthetic construct
  REGION 1..5: note = epitope
PQQPP

SEQ ID NO: 1247 - protein, 6 aa, synthetic construct
  REGION 1..6: note = epitope
PIQQQP

SEQ ID NO: 1248 - protein, 5 aa, synthetic construct
  REGION 1..5: note = epitope
PQQPP

SEQ ID NO: 1249 - protein, 8 aa, synthetic construct
  REGION 1..8: note = epitope
QQPIQQQP

SEQ ID NO: 1250 - protein, 5 aa, synthetic construct
  REGION 1..5: note = epitope
PQQPP

SEQ ID NO: 1251 - protein, 15 aa, synthetic construct
  REGION 1..15: note = epitope
  REGION 1..6: note = misc_feature - Xaa can be any naturally occurring amino acid
  REGION 11..15: note = misc_feature - Xaa can be any naturally occurring amino acid
XXXXXXQPFPXXXXX

SEQ ID NO: 1252 - protein, 5 aa, synthetic construct
  REGION 1..5: note = epitope
PQQPP

SEQ ID NO: 1253 - protein, 10 aa, synthetic construct
  REGION 1..10: note = epitope
PIQQQPQPFP

SEQ ID NO: 1254 - protein, 6 aa, synthetic construct
  REGION 1..6: note = epitope
PIQQQP

SEQ ID NO: 1255 - protein, 6 aa, synthetic construct
  REGION 1..6: note = epitope
PQQPPC

SEQ ID NO: 1256 - protein, 5 aa, synthetic construct
  REGION 1..5: note = epitope
PQQPP

SEQ ID NO: 1257 - protein, 15 aa, synthetic construct
  REGION 1..15: note = epitope
SSLVSMILPRSDCKV

SEQ ID NO: 1258 - protein, 15 aa, synthetic construct
  REGION 1..15: note = epitope
  REGION 1..6: note = misc_feature - Xaa can be any naturally occurring amino acid
  SITE 8: note = misc_feature - Xaa can be any naturally occurring amino acid
  SITE 10: note = misc_feature - Xaa can be any naturally occurring amino acid
XXXXXXIXPXSDCKV

SEQ ID NO: 1259 - protein, 4 aa, synthetic construct
  REGION 1..4: note = epitope
LPRS

SEQ ID NO: 1260 - protein, 15 aa, synthetic construct
  REGION 1..15: note = epitope
  REGION 1..3: note = misc_feature - Xaa can be any naturally occurring amino acid
XXXVSMILPRSDCKV

SEQ ID NO: 1261 - protein, 15 aa, synthetic construct
  REGION 1..15: note = epitope
  REGION 1..4: note = misc_feature - Xaa can be any naturally occurring amino acid
  SITE 13: note = misc_feature - Xaa can be any naturally occurring amino acid
XXXXSMILPRSDXKV

SEQ ID NO: 1262 - protein, 15 aa, synthetic construct
  REGION 1..15: note = epitope
  REGION 1..3: note = misc_feature - Xaa can be any naturally occurring amino acid
  SITE 9: note = misc_feature - Xaa can be any naturally occurring amino acid
XXXVSMILXRSDCKV

SEQ ID NO: 1263 - protein, 15 aa, synthetic construct
  REGION 1..15: note = epitope
  REGION 1..3: note = misc_feature - Xaa can be any naturally occurring amino acid
  SITE 6: note = misc_feature - Xaa can be any naturally occurring amino acid
  REGION 9..13: note = misc_feature - Xaa can be any naturally occurring amino acid
XXXVSXILXXXXXKV

SEQ ID NO: 1264 - protein, 15 aa, synthetic construct
  REGION 1..15: note = epitope
  REGION 1..2: note = misc_feature - Xaa can be any naturally occurring amino acid
XXLVSMILPRSDCKV

SEQ ID NO: 1265 - protein, 15 aa, synthetic construct
  REGION 1..15: note = epitope
  REGION 1..5: note = misc_feature - Xaa can be any naturally occurring amino acid
XXXXXMILPRSDCKV

SEQ ID NO: 1266 - protein, 15 aa, synthetic construct
  REGION 1..15: note = epitope
  REGION 1..6: note = misc_feature - Xaa can be any naturally occurring amino acid
  SITE 8: note = misc_feature - Xaa can be any naturally occurring amino acid
  SITE 13: note = misc_feature - Xaa can be any naturally occurring amino acid
XXXXXXIXPRSDXKV

SEQ ID NO: 1267 - protein, 15 aa, synthetic construct
  REGION 1..15: note = epitope
  REGION 1..2: note = misc_feature - Xaa can be any naturally occurring amino acid
XXLVSMILPRSDCKV

SEQ ID NO: 1268 - protein, 15 aa, synthetic construct
  REGION 1..15: note = epitope
  REGION 1..4: note = misc_feature - Xaa can be any naturally occurring amino acid
XXXXSMILPRSDCKV

SEQ ID NO: 1269 - protein, 4 aa, synthetic construct
  REGION 1..4: note = epitope
LPRS

SEQ ID NO: 1270 - protein, 15 aa, synthetic construct
  REGION 1..15: note = epitope
  REGION 1..3: note = misc_feature - Xaa can be any naturally occurring amino acid
XXXVSMILPRSDCKV

SEQ ID NO: 1271 - protein, 15 aa, synthetic construct
  REGION 1..15: note = epitope
  REGION 1..4: note = misc_feature - Xaa can be any naturally occurring amino acid
  SITE 6: note = misc_feature - Xaa can be any naturally occurring amino acid
  SITE 12: note = misc_feature - Xaa can be any naturally occurring amino acid
XXXXSXILPRSXCKV

SEQ ID NO: 1272 - protein, 15 aa, synthetic construct
  REGION 1..15: note = epitope
  REGION 1..2: note = misc_feature - Xaa can be any naturally occurring amino acid
XXLVSMILPRSDCKV

SEQ ID NO: 1273 - protein, 15 aa, synthetic construct
  REGION 1..15: note = epitope
  REGION 1..3: note = misc_feature - Xaa can be any naturally occurring amino acid
XXXVSMILPRSDCKV

SEQ ID NO: 1274 - protein, 15 aa, synthetic construct
  REGION 1..15: note = epitope
  REGION 1..4: note = misc_feature - Xaa can be any naturally occurring amino acid
XXXXSMILPRSDCKV

SEQ ID NO: 1275 - protein, 15 aa, synthetic construct
  REGION 1..15: note = epitope
  REGION 1..3: note = misc_feature - Xaa can be any naturally occurring amino acid
XXXVSMILPRSDCKV

SEQ ID NO: 1276 - protein, 15 aa, synthetic construct
  REGION 1..15: note = epitope
  REGION 1..4: note = misc_feature - Xaa can be any naturally occurring amino acid
  SITE 9: note = misc_feature - Xaa can be any naturally occurring amino acid
  SITE 11: note = misc_feature - Xaa can be any naturally occurring amino acid
XXXXSMILXRXDCKV

SEQ ID NO: 1277 - protein, 4 aa, synthetic construct
  REGION 1..4: note = epitope
LPRS

SEQ ID NO: 1278 - protein, 15 aa, synthetic construct
  REGION 1..15: note = epitope
  REGION 1..3: note = misc_feature - Xaa can be any naturally occurring amino acid
XXXVSMILPRSDCKV

SEQ ID NO: 1279 - protein, 15 aa, synthetic construct
  REGION 1..15: note = epitope
  REGION 1..4: note = misc_feature - Xaa can be any naturally occurring amino acid
XXXXSMILPRSDCKV

SEQ ID NO: 1280 - protein, 15 aa, synthetic construct
  REGION 1..15: note = epitope
  REGION 1..3: note = misc_feature - Xaa can be any naturally occurring amino acid
XXXVSMILPRSDCKV

SEQ ID NO: 1281 - protein, 15 aa, synthetic construct
  REGION 1..15: note = epitope
  REGION 1..4: note = misc_feature - Xaa can be any naturally occurring amino acid
  SITE 9: note = misc_feature - Xaa can be any naturally occurring amino acid
XXXXSMILXRSDCKV

SEQ ID NO: 1282 - protein, 4 aa, synthetic construct
  REGION 1..4: note = epitope
LPRS

SEQ ID NO: 1283 - protein, 15 aa, synthetic construct
  REGION 1..15: note = epitope
  REGION 1..2: note = misc_feature - Xaa can be any naturally occurring amino acid
  SITE 6: note = misc_feature - Xaa can be any naturally occurring amino acid
  REGION 9..10: note = misc_feature - Xaa can be any naturally occurring amino acid
XXLVSXILXXSDCKV

SEQ ID NO: 1284 - protein, 15 aa, synthetic construct
  REGION 1..15: note = epitope
  REGION 1..3: note = misc_feature - Xaa can be any naturally occurring amino acid
  SITE 6: note = misc_feature - Xaa can be any naturally occurring amino acid
  REGION 8..10: note = misc_feature - Xaa can be any naturally occurring amino acid
XXXVSXIXXXSDCKV

SEQ ID NO: 1285 - protein, 15 aa, synthetic construct
  REGION 1..15: note = epitope
  REGION 1..2: note = misc_feature - Xaa can be any naturally occurring amino acid
  REGION 4..5: note = misc_feature - Xaa can be any naturally occurring amino acid
  REGION 9..10: note = misc_feature - Xaa can be any naturally occurring amino acid
  REGION 13..15: note = misc_feature - Xaa can be any naturally occurring amino acid
XXLXXMILXXSDXXX

SEQ ID NO: 1286 - protein, 15 aa, synthetic construct
  REGION 1..15: note = epitope
  REGION 1..2: note = misc_feature - Xaa can be any naturally occurring amino acid
  REGION 4..5: note = misc_feature - Xaa can be any naturally occurring amino acid
  REGION 9..11: note = misc_feature - Xaa can be any naturally occurring amino acid
  REGION 13..15: note = misc_feature - Xaa can be any naturally occurring amino acid
XXLXXMILXXXDXXX

SEQ ID NO: 1287 - protein, 5 aa, synthetic construct
  REGION 1..5: note = epitope
ILPRS

SEQ ID NO: 1288 - protein, 4 aa, synthetic construct
  REGION 1..4: note = epitope
LPRS

SEQ ID NO: 1289 - protein, 15 aa, synthetic construct
  REGION 1..15: note = epitope
  REGION 1..3: note = misc_feature - Xaa can be any naturally occurring amino acid
  REGION 5..6: note = misc_feature - Xaa can be any naturally occurring amino acid
  SITE 9: note = misc_feature - Xaa can be any naturally occurring amino acid
  SITE 11: note = misc_feature - Xaa can be any naturally occurring amino acid
  SITE 13: note = misc_feature - Xaa can be any naturally occurring amino acid
XXXVXXILXRXDXKV

SEQ ID NO: 1290 - protein, 15 aa, synthetic construct
  REGION 1..15: note = epitope
  REGION 1..6: note = misc_feature - Xaa can be any naturally occurring amino acid
  SITE 9: note = misc_feature - Xaa can be any naturally occurring amino acid
  SITE 11: note = misc_feature - Xaa can be any naturally occurring amino acid
  REGION 13..15: note = misc_feature - Xaa can be any naturally occurring amino acid
XXXXXXILXRXDXXX

SEQ ID NO: 1291 - protein, 4 aa, synthetic construct
  REGION 1..4: note = epitope
LPRS

SEQ ID NO: 1292 - protein, 15 aa, synthetic construct
  REGION 1..15: note = epitope
  REGION 1..2: note = misc_feature - Xaa can be any naturally occurring amino acid
  REGION 9..10: note = misc_feature - Xaa can be any naturally occurring amino acid
XXLVSMILXXSDCKV

SEQ ID NO: 1293 - protein, 15 aa, synthetic construct
  REGION 1..15: note = epitope
  REGION 1..3: note = misc_feature - Xaa can be any naturally occurring amino acid
  REGION 9..10: note = misc_feature - Xaa can be any naturally occurring amino acid
XXXVSMILXXSDCKV

SEQ ID NO: 1294 - protein, 15 aa, synthetic construct
  REGION 1..15: note = epitope
  REGION 1..3: note = misc_feature - Xaa can be any naturally occurring amino acid
  SITE 6: note = misc_feature - Xaa can be any naturally occurring amino acid
  REGION 9..15: note = misc_feature - Xaa can be any naturally occurring amino acid
XXXVSXILXXXXXXX

SEQ ID NO: 1295 - protein, 9 aa, synthetic construct
  REGION 1..9: note = epitope
VSMILPRSD

SEQ ID NO: 1296 - protein, 9 aa, synthetic construct
  REGION 1..9: note = epitope
ILPRSDCKV

SEQ ID NO: 1297 - protein, 15 aa, synthetic construct
  REGION 1..15: note = epitope
SINVENVEDNRRALR

SEQ ID NO: 1298 - protein, 15 aa, synthetic construct
  REGION 1..15: note = epitope
  SITE 9: note = misc_feature - Xaa can be any naturally occurring amino acid
  SITE 14: note = misc_feature - Xaa can be any naturally occurring amino acid
SINVENVEXNRRAXR

SEQ ID NO: 1299 - protein, 15 aa, synthetic construct
  REGION 1..15: note = epitope
  SITE 9: note = misc_feature - Xaa can be any naturally occurring amino acid
  REGION 14..15: note = misc_feature - Xaa can be any naturally occurring amino acid
SINVENVEXNRRAXX

SEQ ID NO: 1300 - protein, 9 aa, synthetic construct
  REGION 1..9: note = epitope
SINVENVED

SEQ ID NO: 1301 - protein, 6 aa, synthetic construct
  REGION 1..6: note = epitope
SINVEN

SEQ ID NO: 1302 - protein, 15 aa, synthetic construct
  REGION 1..15: note = epitope
  REGION 1..4: note = misc_feature - Xaa can be any naturally occurring amino acid
  SITE 7: note = misc_feature - Xaa can be any naturally occurring amino acid
  SITE 10: note = misc_feature - Xaa can be any naturally occurring amino acid
  REGION 12..15: note = misc_feature - Xaa can be any naturally occurring amino acid
XXXXENXEDXRXXXX

SEQ ID NO: 1303 - protein, 5 aa, synthetic construct
  REGION 1..5: note = epitope
INVEN

SEQ ID NO: 1304 - protein, 4 aa, synthetic construct
  REGION 1..4: note = epitope
NVEN

SEQ ID NO: 1305 - protein, 6 aa, synthetic construct
  REGION 1..6: note = epitope
NRRALR

SEQ ID NO: 1306 - protein, 15 aa, synthetic construct
  REGION 1..15: note = epitope
  SITE 2: note = misc_feature - Xaa can be any naturally occurring amino acid
  REGION 5..7: note = misc_feature - Xaa can be any naturally occurring amino acid
  REGION 13..15: note = misc_feature - Xaa can be any naturally occurring amino acid
SXNVXXXEDNRRXXX

SEQ ID NO: 1307 - protein, 4 aa, synthetic construct
  REGION 1..4: note = epitope
NVEN

SEQ ID NO: 1308 - protein, 15 aa, synthetic construct
  REGION 1..15: note = epitope
  SITE 4: note = misc_feature - Xaa can be any naturally occurring amino acid
  REGION 6..7: note = misc_feature - Xaa can be any naturally occurring amino acid
  SITE 9: note = misc_feature - Xaa can be any naturally occurring amino acid
  REGION 12..15: note = misc_feature - Xaa can be any naturally occurring amino acid
SINXEXXEXNRXXXX

SEQ ID NO: 1309 - protein, 15 aa, synthetic construct
  REGION 1..15: note = epitope
  REGION 1..2: note = misc_feature - Xaa can be any naturally occurring amino acid
  SITE 7: note = misc_feature - Xaa can be any naturally occurring amino acid
  REGION 12..15: note = misc_feature - Xaa can be any naturally occurring amino acid
XXNVENXEDNRXXXX

SEQ ID NO: 1310 - protein, 15 aa, synthetic construct
  REGION 1..15: note = epitope
  REGION 1..7: note = misc_feature - Xaa can be any naturally occurring amino acid
  REGION 12..15: note = misc_feature - Xaa can be any naturally occurring amino acid
XXXXXXXEDNRXXXX

SEQ ID NO: 1311 - protein, 4 aa, synthetic construct
  REGION 1..4: note = epitope
NVEN

SEQ ID NO: 1312 - protein, 15 aa, synthetic construct
  REGION 1..15: note = epitope
  REGION 4..9: note = misc_feature - Xaa can be any naturally occurring amino acid
  REGION 12..15: note = misc_feature - Xaa can be any naturally occurring amino acid
SINXXXXXXNRXXXX

SEQ ID NO: 1313 - protein, 4 aa, synthetic construct
  REGION 1..4: note = epitope
NVEN

SEQ ID NO: 1314 - protein, 15 aa, synthetic construct
  REGION 1..15: note = epitope
  REGION 6..8: note = misc_feature - Xaa can be any naturally occurring amino acid
  SITE 10: note = misc_feature - Xaa can be any naturally occurring amino acid
  REGION 12..15: note = misc_feature - Xaa can be any naturally occurring amino acid
SINVEXXXDXRXXXX

SEQ ID NO: 1315 - protein, 15 aa, synthetic construct
  REGION 1..15: note = epitope
  REGION 6..10: note = misc_feature - Xaa can be any naturally occurring amino acid
  REGION 12..15: note = misc_feature - Xaa can be any naturally occurring amino acid
SINVEXXXXXRXXXX

SEQ ID NO: 1316 - protein, 9 aa, synthetic construct
  REGION 1..9: note = epitope
VEDNRRALR

SEQ ID NO: 1317 - protein, 15 aa, synthetic construct
  REGION 1..15: note = epitope
  REGION 1..2: note = misc_feature - Xaa can be any naturally occurring amino acid
  SITE 5: note = misc_feature - Xaa can be any naturally occurring amino acid
  SITE 7: note = misc_feature - Xaa can be any naturally occurring amino acid
  SITE 9: note = misc_feature - Xaa can be any naturally occurring amino acid
  REGION 12..15: note = misc_feature - Xaa can be any naturally occurring amino acid
XXNVXNXEXNRXXXX

SEQ ID NO: 1318 - protein, 15 aa, synthetic construct
  REGION 1..15: note = epitope
  SITE 1: note = misc_feature - Xaa can be any naturally occurring amino acid
  REGION 12..15: note = misc_feature - Xaa can be any naturally occurring amino acid
XINVENVEDNRXXXX

SEQ ID NO: 1319 - protein, 15 aa, synthetic construct
  REGION 1..15: note = epitope
  REGION 1..3: note = misc_feature - Xaa can be any naturally occurring amino acid
  SITE 8: note = misc_feature - Xaa can be any naturally occurring amino acid
  REGION 11..15: note = misc_feature - Xaa can be any naturally occurring amino acid
XXXVENVXDNXXXXX

SEQ ID NO: 1320 - protein, 4 aa, synthetic construct
  REGION 1..4: note = epitope
NVEN

SEQ ID NO: 1321 - protein, 15 aa, synthetic construct
  REGION 1..15: note = epitope
  SITE 2: note = misc_feature - Xaa can be any naturally occurring amino acid
  REGION 14..15: note = misc_feature - Xaa can be any naturally occurring amino acid
SXNVENVEDNRRAXX

SEQ ID NO: 1322 - protein, 15 aa, synthetic construct
  REGION 1..15: note = epitope
  REGION 1..4: note = misc_feature - Xaa can be any naturally occurring amino acid
  REGION 13..15: note = misc_feature - Xaa can be any naturally occurring amino acid
XXXXENVEDNRRXXX

SEQ ID NO: 1323 - protein, 15 aa, synthetic construct
  REGION 1..15: note = epitope
  REGION 1..5: note = misc_feature - Xaa can be any naturally occurring amino acid
  SITE 7: note = misc_feature - Xaa can be any naturally occurring amino acid
  REGION 13..15: note = misc_feature - Xaa can be any naturally occurring amino acid
XXXXXNXEDNRRXXX

SEQ ID NO: 1324 - protein, 5 aa, synthetic construct
  REGION 1..5: note = epitope
INVEN

SEQ ID NO: 1325 - protein, 5 aa, synthetic construct
  REGION 1..5: note = epitope
  SITE 1: note = misc_feature - Xaa can be any naturally occurring amino acid
XNVEN

SEQ ID NO: 1326 - protein, 8 aa, synthetic construct
  REGION 1..8: note = epitope
EDNRRALR

SEQ ID NO: 1327 - protein, 8 aa, synthetic construct
  REGION 1..8: note = epitope
  REGION 7..8: note = misc_feature - Xaa can be any naturally occurring amino acid
EDNRRAXX

SEQ ID NO: 1328 - protein, 8 aa, synthetic construct
  REGION 1..8: note = epitope
  REGION 6..8: note = misc_feature - Xaa can be any naturally occurring amino acid
EDNRRXXX

SEQ ID NO: 1329 - protein, 15 aa, synthetic construct
  REGION 1..15: note = epitope
  SITE 1: note = misc_feature - Xaa can be any naturally occurring amino acid
  SITE 3: note = misc_feature - Xaa can be any naturally occurring amino acid
  REGION 6..7: note = misc_feature - Xaa can be any naturally occurring amino acid
  SITE 12: note = misc_feature - Xaa can be any naturally occurring amino acid
  SITE 15: note = misc_feature - Xaa can be any naturally occurring amino acid
XIXVEXXEDNRXALX

SEQ ID NO: 1330 - protein, 15 aa, synthetic construct
  REGION 1..15: note = epitope
  SITE 1: note = misc_feature - Xaa can be any naturally occurring amino acid
  SITE 3: note = misc_feature - Xaa can be any naturally occurring amino acid
  REGION 6..7: note = misc_feature - Xaa can be any naturally occurring amino acid
  REGION 12..15: note = misc_feature - Xaa can be any naturally occurring amino acid
XIXVEXXEDNRXXXX

SEQ ID NO: 1331 - protein, 15 aa, synthetic construct
  REGION 1..15: note = epitope
  SITE 1: note = misc_feature - Xaa can be any naturally occurring amino acid
  SITE 3: note = misc_feature - Xaa can be any naturally occurring amino acid
  REGION 6..8: note = misc_feature - Xaa can be any naturally occurring amino acid
  REGION 12..15: note = misc_feature - Xaa can be any naturally occurring amino acid
XIXVEXXXDNRXXXX

SEQ ID NO: 1332 - protein, 6 aa, synthetic construct
  REGION 1..6: note = epitope
SINVEN

SEQ ID NO: 1333 - protein, 5 aa, synthetic construct
  REGION 1..5: note = epitope
INVEN

SEQ ID NO: 1334 - protein, 15 aa, synthetic construct
  REGION 1..15: note = epitope
  REGION 13..15: note = misc_feature - Xaa can be any naturally occurring amino acid
SINVENVEDNRRXXX

SEQ ID NO: 1335 - protein, 15 aa, synthetic construct
  REGION 1..15: note = epitope
  REGION 12..15: note = misc_feature - Xaa can be any naturally occurring amino acid
SINVENVEDNRXXXX

SEQ ID NO: 1336 - protein, 4 aa, synthetic construct
  REGION 1..4: note = epitope
NVEN

SEQ ID NO: 1337 - protein, 15 aa, synthetic construct
  REGION 1..15: note = epitope
  SITE 1: note = misc_feature - Xaa can be any naturally occurring amino acid
  REGION 3..5: note = misc_feature - Xaa can be any naturally occurring amino acid
  REGION 13..15: note = misc_feature - Xaa can be any naturally occurring amino acid
XIXXXNVEDNRRXXX

SEQ ID NO: 1338 - protein, 15 aa, synthetic construct
  REGION 1..15: note = epitope
  SITE 1: note = misc_feature - Xaa can be any naturally occurring amino acid
  REGION 3..6: note = misc_feature - Xaa can be any naturally occurring amino acid
  REGION 13..15: note = misc_feature - Xaa can be any naturally occurring amino acid
XIXXXXVEDNRRXXX

SEQ ID NO: 1339 - protein, 5 aa, synthetic construct
  REGION 1..5: note = epitope
INVEN

SEQ ID NO: 1340 - protein, 4 aa, synthetic construct
  REGION 1..4: note = epitope
NVEN

SEQ ID NO: 1341 - protein, 6 aa, synthetic construct
  REGION 1..6: note = epitope
NRRALR

SEQ ID NO: 1342 - protein, 15 aa, synthetic construct
  REGION 1..15: note = epitope
  REGION 12..15: note = misc_feature - Xaa can be any naturally occurring amino acid
SINVENVEDNRXXXX

SEQ ID NO: 1343 - protein, 15 aa, synthetic construct
  REGION 1..15: note = epitope
  SITE 1: note = misc_feature - Xaa can be any naturally occurring amino acid
  REGION 12..15: note = misc_feature - Xaa can be any naturally occurring amino acid
XINVENVEDNRXXXX

SEQ ID NO: 1344 - protein, 5 aa, synthetic construct
  REGION 1..5: note = epitope
INVEN

SEQ ID NO: 1345 - protein, 4 aa, synthetic construct
  REGION 1..4: note = epitope
NVEN

SEQ ID NO: 1346 - protein, 6 aa, synthetic construct
  REGION 1..6: note = epitope
NRRALR

SEQ ID NO: 1347 - protein, 15 aa, synthetic construct
  REGION 1..15: note = epitope
  SITE 1: note = misc_feature - Xaa can be any naturally occurring amino acid
  SITE 3: note = misc_feature - Xaa can be any naturally occurring amino acid
  SITE 15: note = misc_feature - Xaa can be any naturally occurring amino acid
XIXVENVEDNRRALX

SEQ ID NO: 1348 - protein, 15 aa, synthetic construct
  REGION 1..15: note = epitope
  SITE 1: note = misc_feature - Xaa can be any naturally occurring amino acid
  SITE 3: note = misc_feature - Xaa can be any naturally occurring amino acid
  REGION 14..15: note = misc_feature - Xaa can be any naturally occurring amino acid
XIXVENVEDNRRAXX

SEQ ID NO: 1349 - protein, 15 aa, synthetic construct
  REGION 1..15: note = epitope
  REGION 1..4: note = misc_feature - Xaa can be any naturally occurring amino acid
  SITE 6: note = misc_feature - Xaa can be any naturally occurring amino acid
  SITE 9: note = misc_feature - Xaa can be any naturally occurring amino acid
  REGION 13..15: note = misc_feature - Xaa can be any naturally occurring amino acid
XXXXEXVEXNRRXXX

SEQ ID NO: 1350 - protein, 6 aa, synthetic construct
  REGION 1..6: note = epitope
SINVEN

SEQ ID NO: 1351 - protein, 5 aa, synthetic construct
  REGION 1..5: note = epitope
INVEN

SEQ ID NO: 1352 - protein, 5 aa, synthetic construct
  REGION 1..5: note = epitope
  SITE 2: note = misc_feature - Xaa can be any naturally occurring amino acid
IXVEN

SEQ ID NO: 1353 - protein, 4 aa, synthetic construct
  REGION 1..4: note = epitope
NVEN

SEQ ID NO: 1354 - protein, 9 aa, synthetic construct
  REGION 1..9: note = epitope
VEDNRRALR

SEQ ID NO: 1355 - protein, 15 aa, synthetic construct
  REGION 1..15: note = epitope
  REGION 1..3: note = misc_feature - Xaa can be any naturally occurring amino acid
  SITE 5: note = misc_feature - Xaa can be any naturally occurring amino acid
  SITE 8: note = misc_feature - Xaa can be any naturally occurring amino acid
  REGION 13..15: note = misc_feature - Xaa can be any naturally occurring amino acid
XXXVXNVXDNRRXXX

SEQ ID NO: 1356 - protein, 5 aa, synthetic construct
  REGION 1..5: note = epitope
INVEN

SEQ ID NO: 1357 - protein, 4 aa, synthetic construct
  REGION 1..4: note = epitope
NVEN

SEQ ID NO: 1358 - protein, 9 aa, synthetic construct
  REGION 1..9: note = epitope
VEDNRRALR

SEQ ID NO: 1359 - protein, 9 aa, synthetic construct
  REGION 1..9: note = epitope
  SITE 2: note = misc_feature - Xaa can be any naturally occurring amino acid
  REGION 7..9: note = misc_feature - Xaa can be any naturally occurring amino acid
VXDNRRXXX

SEQ ID NO: 1360 - protein, 5 aa, synthetic construct
  REGION 1..5: note = epitope
INVEN

SEQ ID NO: 1361 - protein, 4 aa, synthetic construct
  REGION 1..4: note = epitope
NVEN

SEQ ID NO: 1362 - protein, 15 aa, synthetic construct
  REGION 1..15: note = epitope
  REGION 14..15: note = misc_feature - Xaa can be any naturally occurring amino acid
SINVENVEDNRRAXX

SEQ ID NO: 1363 - protein, 15 aa, synthetic construct
  REGION 1..15: note = epitope
  REGION 1..2: note = misc_feature - Xaa can be any naturally occurring amino acid
  SITE 5: note = misc_feature - Xaa can be any naturally occurring amino acid
  REGION 13..15: note = misc_feature - Xaa can be any naturally occurring amino acid
XXNVXNVEDNRRXXX

SEQ ID NO: 1364 - protein, 15 aa, synthetic construct
  REGION 1..15: note = epitope
  REGION 1..2: note = misc_feature - Xaa can be any naturally occurring amino acid
  REGION 4..5: note = misc_feature - Xaa can be any naturally occurring amino acid
  REGION 13..15: note = misc_feature - Xaa can be any naturally occurring amino acid
XXNXXNVEDNRRXXX

SEQ ID NO: 1365 - protein, 6 aa, synthetic construct
  REGION 1..6: note = epitope
SINVEN

SEQ ID NO: 1366 - protein, 5 aa, synthetic construct
  REGION 1..5: note = epitope
INVEN

SEQ ID NO: 1367 - protein, 15 aa, synthetic construct
  REGION 1..15: note = epitope
KPWQQQPLPPQQQPP

SEQ ID NO: 1368 - protein, 6 aa, synthetic construct
  REGION 1..6: note = epitope
KPWQQQ

SEQ ID NO: 1369 - protein, 8 aa, synthetic construct
  REGION 1..8: note = epitope
QQPLPPQQ

SEQ ID NO: 1370 - protein, 7 aa, synthetic construct
  REGION 1..7: note = epitope
QPLPPQQ

SEQ ID NO: 1371 - protein, 9 aa, synthetic construct
  REGION 1..9: note = epitope
QPLPPQQQP

SEQ ID NO: 1372 - protein, 8 aa, synthetic construct
  REGION 1..8: note = epitope
QPLPPQQQ

SEQ ID NO: 1373 - protein, 9 aa, synthetic construct
  REGION 1..9: note = epitope
KPWQQQPLP

SEQ ID NO: 1374 - protein, 8 aa, synthetic construct
  REGION 1..8: note = epitope
PWQQQPLP

SEQ ID NO: 1375 - protein, 7 aa, synthetic construct
  REGION 1..7: note = epitope
PWQQQPL

SEQ ID NO: 1376 - protein, 15 aa, synthetic construct
  REGION 1..15: note = epitope
  REGION 9..11: note = misc_feature - Xaa can be any naturally occurring amino acid
  REGION 13..14: note = misc_feature - Xaa can be any naturally occurring amino acid
KPWQQQPLXXXQXXP

SEQ ID NO: 1377 - protein, 15 aa, synthetic construct
  REGION 1..15: note = epitope
  SITE 1: note = misc_feature - Xaa can be any naturally occurring amino acid
  REGION 6..15: note = misc_feature - Xaa can be any naturally occurring amino acid
XPWQQXXXXXXXXXX

SEQ ID NO: 1378 - protein, 10 aa, synthetic construct
  REGION 1..10: note = epitope
QQPLPPQQQP

SEQ ID NO: 1379 - protein, 10 aa, synthetic construct
  REGION 1..10: note = epitope
  REGION 5..7: note = misc_feature - Xaa can be any naturally occurring amino acid
  REGION 9..10: note = misc_feature - Xaa can be any naturally occurring amino acid
QQPLXXXQXX

SEQ ID NO: 1380 - protein, 10 aa, synthetic construct
  REGION 1..10: note = epitope
PWQQQPLPPQ

SEQ ID NO: 1381 - protein, 10 aa, synthetic construct
  REGION 1..10: note = epitope
PWQQQPLPPQ

SEQ ID NO: 1382 - protein, 9 aa, synthetic construct
  REGION 1..9: note = epitope
PWQQQPLPP

SEQ ID NO: 1383 - protein, 5 aa, synthetic construct
  REGION 1..5: note = epitope
PPQQQ

SEQ ID NO: 1384 - protein, 15 aa, synthetic construct
  REGION 1..15: note = epitope
  SITE 2: note = misc_feature - Xaa can be any naturally occurring amino acid
  SITE 4: note = misc_feature - Xaa can be any naturally occurring amino acid
  REGION 9..15: note = misc_feature - Xaa can be any naturally occurring amino acid
KXWXQQPLXXXXXXX

SEQ ID NO: 1385 - protein, 9 aa, synthetic construct
  REGION 1..9: note = epitope
KPWQQQPLP

SEQ ID NO: 1386 - protein, 9 aa, synthetic construct
  REGION 1..9: note = epitope
  SITE 2: note = misc_feature - Xaa can be any naturally occurring amino acid
  SITE 4: note = misc_feature - Xaa can be any naturally occurring amino acid
  SITE 9: note = misc_feature - Xaa can be any naturally occurring amino acid
KXWXQQPLX

SEQ ID NO: 1387 - protein, 10 aa, synthetic construct
  REGION 1..10: note = epitope
QQQPLPPQQQ

SEQ ID NO: 1388 - protein, 9 aa, synthetic construct
  REGION 1..9: note = epitope
QQPLPPQQQ

SEQ ID NO: 1389 - protein, 9 aa, synthetic construct
  REGION 1..9: note = epitope
  REGION 5..9: note = misc_feature - Xaa can be any naturally occurring amino acid
QQPLXXXXX

SEQ ID NO: 1390 - protein, 5 aa, synthetic construct
  REGION 1..5: note = epitope
PWQQQ

SEQ ID NO: 1391 - protein, 8 aa, synthetic construct
  REGION 1..8: note = epitope
QPLPPQQQ

SEQ ID NO: 1392 - protein, 10 aa, synthetic construct
  REGION 1..10: note = epitope
KPWQQQPLPP

SEQ ID NO: 1393 - protein, 8 aa, synthetic construct
  REGION 1..8: note = epitope
QPLPPQQQ

SEQ ID NO: 1394 - protein, 4 aa, synthetic construct
  REGION 1..4: note = epitope
QPLP

SEQ ID NO: 1395 - protein, 15 aa, synthetic construct
  REGION 1..15: note = epitope
  REGION 6..7: note = misc_feature - Xaa can be any naturally occurring amino acid
  REGION 9..10: note = misc_feature - Xaa can be any naturally occurring amino acid
KPWQQXXLXXQQQPP

SEQ ID NO: 1396 - protein, 15 aa, synthetic construct
  REGION 1..15: note = epitope
  REGION 6..12: note = misc_feature - Xaa can be any naturally occurring amino acid
  SITE 15: note = misc_feature - Xaa can be any naturally occurring amino acid
KPWQQXXXXXXXQPX

SEQ ID NO: 1397 - protein, 15 aa, synthetic construct
  REGION 1..15: note = epitope
  SITE 1: note = misc_feature - Xaa can be any naturally occurring amino acid
  REGION 6..15: note = misc_feature - Xaa can be any naturally occurring amino acid
XPWQQXXXXXXXXXX

SEQ ID NO: 1398 - protein, 10 aa, synthetic construct
  REGION 1..10: note = epitope
KPWQQQPLPP

SEQ ID NO: 1399 - protein, 10 aa, synthetic construct
  REGION 1..10: note = epitope
  REGION 6..7: note = misc_feature - Xaa can be any naturally occurring amino acid
  REGION 9..10: note = misc_feature - Xaa can be any naturally occurring amino acid
KPWQQXXLXX

SEQ ID NO: 1400 - protein, 10 aa, synthetic construct
  REGION 1..10: note = epitope
  REGION 6..10: note = misc_feature - Xaa can be any naturally occurring amino acid
KPWQQXXXXX

SEQ ID NO: 1401 - protein, 6 aa, synthetic construct
  REGION 1..6: note = epitope
KPWQQQ

SEQ ID NO: 1402 - protein, 6 aa, synthetic construct
  REGION 1..6: note = epitope
  SITE 6: note = misc_feature - Xaa can be any naturally occurring amino acid
KPWQQX

SEQ ID NO: 1403 - protein, 15 aa, synthetic construct
  REGION 1..15: note = epitope
QYLQPQQPISQQQAQ

SEQ ID NO: 1404 - protein, 15 aa, synthetic construct
  REGION 1..15: note = epitope
  SITE 1: note = misc_feature - Xaa can be any naturally occurring amino acid
  REGION 3..8: note = misc_feature - Xaa can be any naturally occurring amino acid
  SITE 10: note = misc_feature - Xaa can be any naturally occurring amino acid
  REGION 12..14: note = misc_feature - Xaa can be any naturally occurring amino acid
XYXXXXXXIXQXXXQ

SEQ ID NO: 1405 - protein, 10 aa, synthetic construct
  REGION 1..10: note = epitope
YLQPQQPISQ

SEQ ID NO: 1406 - protein, 15 aa, synthetic construct
  REGION 1..15: note = epitope
  SITE 1: note = misc_feature - Xaa can be any naturally occurring amino acid
  REGION 3..4: note = misc_feature - Xaa can be any naturally occurring amino acid
  SITE 8: note = misc_feature - Xaa can be any naturally occurring amino acid
  REGION 10..11: note = misc_feature - Xaa can be any naturally occurring amino acid
  REGION 14..15: note = misc_feature - Xaa can be any naturally occurring amino acid
XYXXPQQXIXXQQXX

SEQ ID NO: 1407 - protein, 10 aa, synthetic construct
  REGION 1..10: note = epitope
YLQPQQPISQ

SEQ ID NO: 1408 - protein, 10 aa, synthetic construct
  REGION 1..10: note = epitope
  REGION 2..3: note = misc_feature - Xaa can be any naturally occurring amino acid
  SITE 7: note = misc_feature - Xaa can be any naturally occurring amino acid
  REGION 9..10: note = misc_feature - Xaa can be any naturally occurring amino acid
YXXPQQXIXX

SEQ ID NO: 1409 - protein, 10 aa, synthetic construct
  REGION 1..10: note = epitope
QPQQPISQQQ

SEQ ID NO: 1410 - protein, 10 aa, synthetic construct
  REGION 1..10: note = epitope
  SITE 1: note = misc_feature - Xaa can be any naturally occurring amino acid
  SITE 5: note = misc_feature - Xaa can be any naturally occurring amino acid
  REGION 7..8: note = misc_feature - Xaa can be any naturally occurring amino acid
XPQQXIXXQQ

SEQ ID NO: 1411 - protein, 10 aa, synthetic construct
  REGION 1..10: note = epitope
QQPISQQQAQ

SEQ ID NO: 1412 - protein, 10 aa, synthetic construct
  REGION 1..10: note = epitope
  SITE 3: note = misc_feature - Xaa can be any naturally occurring amino acid
  REGION 5..6: note = misc_feature - Xaa can be any naturally occurring amino acid
  REGION 9..10: note = misc_feature - Xaa can be any naturally occurring amino acid
QQXIXXQQXX

SEQ ID NO: 1413 - protein, 15 aa, synthetic construct
  REGION 1..15: note = epitope
  REGION 1..6: note = misc_feature - Xaa can be any naturally occurring amino acid
  SITE 8: note = misc_feature - Xaa can be any naturally occurring amino acid
  SITE 10: note = misc_feature - Xaa can be any naturally occurring amino acid
  SITE 12: note = misc_feature - Xaa can be any naturally occurring amino acid
  SITE 14: note = misc_feature - Xaa can be any naturally occurring amino acid
XXXXXXQXIXQXQXQ

SEQ ID NO: 1414 - protein, 10 aa, synthetic construct
  REGION 1..10: note = epitope
YLQPQQPISQ

SEQ ID NO: 1415 - protein, 9 aa, synthetic construct
  REGION 1..9: note = epitope
YLQPQQPIS

SEQ ID NO: 1416 - protein, 9 aa, synthetic construct
  REGION 1..9: note = epitope
YLQPQQPIS

SEQ ID NO: 1417 - protein, 10 aa, synthetic construct
  REGION 1..10: note = epitope
QQPISQQQAQ

SEQ ID NO: 1418 - protein, 10 aa, synthetic construct
  REGION 1..10: note = epitope
YLQPQQPISQ

SEQ ID NO: 1419 - protein, 9 aa, synthetic construct
  REGION 1..9: note = epitope
YLQPQQPIS

SEQ ID NO: 1420 - protein, 5 aa, synthetic construct
  REGION 1..5: note = epitope
SQQQA

SEQ ID NO: 1421 - protein, 9 aa, synthetic construct
  REGION 1..9: note = epitope
YLQPQQPIS

SEQ ID NO: 1422 - protein, 6 aa, synthetic construct
  REGION 1..6: note = epitope
YLQPQQ

SEQ ID NO: 1423 - protein, 5 aa, synthetic construct
  REGION 1..5: note = epitope
YLQPQ

SEQ ID NO: 1424 - protein, 5 aa, synthetic construct
  REGION 1..5: note = epitope
SQQQA

SEQ ID NO: 1425 - protein, 9 aa, synthetic construct
  REGION 1..9: note = epitope
YLQPQQPIS

SEQ ID NO: 1426 - protein, 5 aa, synthetic construct
  REGION 1..5: note = epitope
YLQPQ

SEQ ID NO: 1427 - protein, 10 aa, synthetic construct
  REGION 1..10: note = epitope
YLQPQQPISQ

SEQ ID NO: 1428 - protein, 9 aa, synthetic construct
  REGION 1..9: note = epitope
YLQPQQPIS

SEQ ID NO: 1429 - protein, 6 aa, synthetic construct
  REGION 1..6: note = epitope
YLQPQQ

SEQ ID NO: 1430 - protein, 9 aa, synthetic construct
  REGION 1..9: note = epitope
YLQPQQPIS

SEQ ID NO: 1431 - protein, 7 aa, synthetic construct
  REGION 1..7: note = epitope
YLQPQQP

SEQ ID NO: 1432 - protein, 6 aa, synthetic construct
  REGION 1..6: note = epitope
SQQQAQ

SEQ ID NO: 1433 - protein, 15 aa, synthetic construct
  REGION 1..15: note = epitope
  SITE 1: note = misc_feature - Xaa can be any naturally occurring amino acid
  REGION 3..4: note = misc_feature - Xaa can be any naturally occurring amino acid
  SITE 6: note = misc_feature - Xaa can be any naturally occurring amino acid
  REGION 10..12: note = misc_feature - Xaa can be any naturally occurring amino acid
  SITE 14: note = misc_feature - Xaa can be any naturally occurring amino acid
XYXXPXQPIXXXQXQ

SEQ ID NO: 1434 - protein, 8 aa, synthetic construct
  REGION 1..8: note = epitope
YLQPQQPI

SEQ ID NO: 1435 - protein, 8 aa, synthetic construct
  REGION 1..8: note = epitope
  REGION 2..3: note = misc_feature - Xaa can be any naturally occurring amino acid
  SITE 5: note = misc_feature - Xaa can be any naturally occurring amino acid
YXXPXQPI

SEQ ID NO: 1436 - protein, 6 aa, synthetic construct
  REGION 1..6: note = epitope
LQPQQP

SEQ ID NO: 1437 - protein, 10 aa, synthetic construct
  REGION 1..10: note = epitope
PQQPISQQQA

SEQ ID NO: 1438 - protein, 10 aa, synthetic construct
  REGION 1..10: note = epitope
  SITE 2: note = misc_feature - Xaa can be any naturally occurring amino acid
  REGION 6..8: note = misc_feature - Xaa can be any naturally occurring amino acid
  SITE 10: note = misc_feature - Xaa can be any naturally occurring amino acid
PXQPIXXXQX

SEQ ID NO: 1439 - protein, 5 aa, synthetic construct
  REGION 1..5: note = epitope
SQQQA

SEQ ID NO: 1440 - protein, 15 aa, synthetic construct
  REGION 1..15: note = epitope
  SITE 1: note = misc_feature - Xaa can be any naturally occurring amino acid
  REGION 3..6: note = misc_feature - Xaa can be any naturally occurring amino acid
  REGION 8..10: note = misc_feature - Xaa can be any naturally occurring amino acid
  SITE 12: note = misc_feature - Xaa can be any naturally occurring amino acid
  SITE 14: note = misc_feature - Xaa can be any naturally occurring amino acid
XYXXXXQXXXQXQXQ

SEQ ID NO: 1441 - protein, 10 aa, synthetic construct
  REGION 1..10: note = epitope
YLQPQQPISQ

SEQ ID NO: 1442 - protein, 9 aa, synthetic construct
  REGION 1..9: note = epitope
YLQPQQPIS

SEQ ID NO: 1443 - protein, 5 aa, synthetic construct
  REGION 1..5: note = epitope
SQQQA

SEQ ID NO: 1444 - protein, 9 aa, synthetic construct
  REGION 1..9: note = epitope
YLQPQQPIS

SEQ ID NO: 1445 - protein, 5 aa, synthetic construct
  REGION 1..5: note = epitope
YLQPQ

SEQ ID NO: 1446 - protein, 9 aa, synthetic construct
  REGION 1..9: note = epitope
PQQPISQQQ

SEQ ID NO: 1447 - protein, 8 aa, synthetic construct
  REGION 1..8: note = epitope
QQPISQQQ

SEQ ID NO: 1448 - protein, 15 aa, synthetic construct
  REGION 1..15: note = epitope
  SITE 1: note = misc_feature - Xaa can be any naturally occurring amino acid
  SITE 4: note = misc_feature - Xaa can be any naturally occurring amino acid
  SITE 6: note = misc_feature - Xaa can be any naturally occurring amino acid
  SITE 8: note = misc_feature - Xaa can be any naturally occurring amino acid
  SITE 10: note = misc_feature - Xaa can be any naturally occurring amino acid
  SITE 14: note = misc_feature - Xaa can be any naturally occurring amino acid
XYLXPXQXIXQQQXQ

SEQ ID NO: 1449 - protein, 15 aa, synthetic construct
  REGION 1..15: note = epitope
  SITE 1: note = misc_feature - Xaa can be any naturally occurring amino acid
  SITE 4: note = misc_feature - Xaa can be any naturally occurring amino acid
  SITE 6: note = misc_feature - Xaa can be any naturally occurring amino acid
  SITE 8: note = misc_feature - Xaa can be any naturally occurring amino acid
  REGION 10..11: note = misc_feature - Xaa can be any naturally occurring amino acid
  SITE 14: note = misc_feature - Xaa can be any naturally occurring amino acid
XYLXPXQXIXXQQXQ

SEQ ID NO: 1450 - protein, 10 aa, synthetic construct
  REGION 1..10: note = epitope
YLQPQQPISQ

SEQ ID NO: 1451 - protein, 9 aa, synthetic construct
  REGION 1..9: note = epitope
LQPQQPISQ

SEQ ID NO: 1452 - protein, 9 aa, synthetic construct
  REGION 1..9: note = epitope
  SITE 2: note = misc_feature - Xaa can be any naturally occurring amino acid
  SITE 4: note = misc_feature - Xaa can be any naturally occurring amino acid
  SITE 6: note = misc_feature - Xaa can be any naturally occurring amino acid
  SITE 8: note = misc_feature - Xaa can be any naturally occurring amino acid
LXPXQXIXQ

SEQ ID NO: 1453 - protein, 9 aa, synthetic construct
  REGION 1..9: note = epitope
  SITE 2: note = misc_feature - Xaa can be any naturally occurring amino acid
  SITE 4: note = misc_feature - Xaa can be any naturally occurring amino acid
  SITE 6: note = misc_feature - Xaa can be any naturally occurring amino acid
  REGION 8..9: note = misc_feature - Xaa can be any naturally occurring amino acid
LXPXQXIXX

SEQ ID NO: 1454 - protein, 10 aa, synthetic construct
  REGION 1..10: note = epitope
QQPISQQQAQ

SEQ ID NO: 1455 - protein, 10 aa, synthetic construct
  REGION 1..10: note = epitope
  SITE 1: note = misc_feature - Xaa can be any naturally occurring amino acid
  SITE 3: note = misc_feature - Xaa can be any naturally occurring amino acid
  SITE 5: note = misc_feature - Xaa can be any naturally occurring amino acid
  SITE 9: note = misc_feature - Xaa can be any naturally occurring amino acid
XQXIXQQQXQ

SEQ ID NO: 1456 - protein, 10 aa, synthetic construct
  REGION 1..10: note = epitope
  SITE 1: note = misc_feature - Xaa can be any naturally occurring amino acid
  SITE 3: note = misc_feature - Xaa can be any naturally occurring amino acid
  REGION 5..6: note = misc_feature - Xaa can be any naturally occurring amino acid
  SITE 9: note = misc_feature - Xaa can be any naturally occurring amino acid
XQXIXXQQXQ

SEQ ID NO: 1457 - protein, 15 aa, synthetic construct
  REGION 1..15: note = epitope
  SITE 1: note = misc_feature - Xaa can be any naturally occurring amino acid
  SITE 4: note = misc_feature - Xaa can be any naturally occurring amino acid
  SITE 8: note = misc_feature - Xaa can be any naturally occurring amino acid
  SITE 12: note = misc_feature - Xaa can be any naturally occurring amino acid
  SITE 14: note = misc_feature - Xaa can be any naturally occurring amino acid
XYLXPQQXISQXQXQ

SEQ ID NO: 1458 - protein, 15 aa, synthetic construct
  REGION 1..15: note = epitope
  REGION 1..2: note = misc_feature - Xaa can be any naturally occurring amino acid
  SITE 4: note = misc_feature - Xaa can be any naturally occurring amino acid
  SITE 6: note = misc_feature - Xaa can be any naturally occurring amino acid
  SITE 8: note = misc_feature - Xaa can be any naturally occurring amino acid
  REGION 11..12: note = misc_feature - Xaa can be any naturally occurring amino acid
  SITE 14: note = misc_feature - Xaa can be any naturally occurring amino acid
XXLXPXQXISXXQXQ

SEQ ID NO: 1459 - protein, 10 aa, synthetic construct
  REGION 1..10: note = epitope
YLQPQQPISQ

SEQ ID NO: 1460 - protein, 9 aa, synthetic construct
  REGION 1..9: note = epitope
LQPQQPISQ

SEQ ID NO: 1461 - protein, 9 aa, synthetic construct
  REGION 1..9: note = epitope
  SITE 2: note = misc_feature - Xaa can be any naturally occurring amino acid
  SITE 6: note = misc_feature - Xaa can be any naturally occurring amino acid
LXPQQXISQ

SEQ ID NO: 1462 - protein, 9 aa, synthetic construct
  REGION 1..9: note = epitope
  SITE 2: note = misc_feature - Xaa can be any naturally occurring amino acid
  SITE 4: note = misc_feature - Xaa can be any naturally occurring amino acid
  SITE 6: note = misc_feature - Xaa can be any naturally occurring amino acid
  SITE 9: note = misc_feature - Xaa can be any naturally occurring amino acid
LXPXQXISX

SEQ ID NO: 1463 - protein, 10 aa, synthetic construct
  REGION 1..10: note = epitope
QQPISQQQAQ

SEQ ID NO: 1464 - protein, 9 aa, synthetic construct
  REGION 1..9: note = epitope
QQPISQQQA

SEQ ID NO: 1465 - protein, 9 aa, synthetic construct
  REGION 1..9: note = epitope
  SITE 3: note = misc_feature - Xaa can be any naturally occurring amino acid
  SITE 7: note = misc_feature - Xaa can be any naturally occurring amino acid
  SITE 9: note = misc_feature - Xaa can be any naturally occurring amino acid
QQXISQXQX

SEQ ID NO: 1466 - protein, 9 aa, synthetic construct
  REGION 1..9: note = epitope
  SITE 1: note = misc_feature - Xaa can be any naturally occurring amino acid
  SITE 3: note = misc_feature - Xaa can be any naturally occurring amino acid
  REGION 6..7: note = misc_feature - Xaa can be any naturally occurring amino acid
  SITE 9: note = misc_feature - Xaa can be any naturally occurring amino acid
XQXISXXQX

SEQ ID NO: 1467 - protein, 9 aa, synthetic construct
  REGION 1..9: note = epitope
YLQPQQPIS

SEQ ID NO: 1468 - protein, 7 aa, synthetic construct
  REGION 1..7: note = epitope
YLQPQQP

SEQ ID NO: 1469 - protein, 15 aa, synthetic construct
  REGION 1..15: note = epitope
  SITE 1: note = misc_feature - Xaa can be any naturally occurring amino acid
  REGION 3..4: note = misc_feature - Xaa can be any naturally occurring amino acid
  SITE 6: note = misc_feature - Xaa can be any naturally occurring amino acid
  SITE 8: note = misc_feature - Xaa can be any naturally occurring amino acid
  SITE 12: note = misc_feature - Xaa can be any naturally occurring amino acid
  SITE 14: note = misc_feature - Xaa can be any naturally occurring amino acid
XYXXPXQXISQXQXQ

SEQ ID NO: 1470 - protein, 15 aa, synthetic construct
  REGION 1..15: note = epitope
  REGION 1..6: note = misc_feature - Xaa can be any naturally occurring amino acid
  SITE 8: note = misc_feature - Xaa can be any naturally occurring amino acid
  SITE 10: note = misc_feature - Xaa can be any naturally occurring amino acid
  SITE 12: note = misc_feature - Xaa can be any naturally occurring amino acid
  SITE 14: note = misc_feature - Xaa can be any naturally occurring amino acid
XXXXXXQXIXQXQXQ

SEQ ID NO: 1471 - protein, 15 aa, synthetic construct
  REGION 1..15: note = epitope
  REGION 1..8: note = misc_feature - Xaa can be any naturally occurring amino acid
  SITE 10: note = misc_feature - Xaa can be any naturally occurring amino acid
  SITE 12: note = misc_feature - Xaa can be any naturally occurring amino acid
  SITE 14: note = misc_feature - Xaa can be any naturally occurring amino acid
XXXXXXXXIXQXQXQ

SEQ ID NO: 1472 - protein, 9 aa, synthetic construct
  REGION 1..9: note = epitope
YLQPQQPIS

SEQ ID NO: 1473 - protein, 9 aa, synthetic construct
  REGION 1..9: note = epitope
  REGION 2..3: note = misc_feature - Xaa can be any naturally occurring amino acid
  SITE 5: note = misc_feature - Xaa can be any naturally occurring amino acid
  SITE 7: note = misc_feature - Xaa can be any naturally occurring amino acid
YXXPXQXIS

SEQ ID NO: 1474 - protein, 8 aa, synthetic construct
  REGION 1..8: note = epitope
LQPQQPIS

SEQ ID NO: 1475 - protein, 8 aa, synthetic construct
  REGION 1..8: note = epitope
  REGION 1..2: note = misc_feature - Xaa can be any naturally occurring amino acid
  SITE 4: note = misc_feature - Xaa can be any naturally occurring amino acid
  SITE 6: note = misc_feature - Xaa can be any naturally occurring amino acid
XXPXQXIS

SEQ ID NO: 1476 - protein, 15 aa, synthetic construct
  REGION 1..15: note = epitope
  SITE 1: note = misc_feature - Xaa can be any naturally occurring amino acid
  REGION 3..5: note = misc_feature - Xaa can be any naturally occurring amino acid
  REGION 7..8: note = misc_feature - Xaa can be any naturally occurring amino acid
  REGION 10..11: note = misc_feature - Xaa can be any naturally occurring amino acid
  REGION 14..15: note = misc_feature - Xaa can be any naturally occurring amino acid
XYXXXQXXIXXQQXX

SEQ ID NO: 1477 - protein, 10 aa, synthetic construct
  REGION 1..10: note = epitope
YLQPQQPISQ

SEQ ID NO: 1478 - protein, 9 aa, synthetic construct
  REGION 1..9: note = epitope
YLQPQQPIS

SEQ ID NO: 1479 - protein, 10 aa, synthetic construct
  REGION 1..10: note = epitope
YLQPQQPISQ

SEQ ID NO: 1480 - protein, 9 aa, synthetic construct
  REGION 1..9: note = epitope
YLQPQQPIS

SEQ ID NO: 1481 - protein, 15 aa, synthetic construct
  REGION 1..15: note = epitope
  SITE 1: note = misc_feature - Xaa can be any naturally occurring amino acid
  REGION 3..4: note = misc_feature - Xaa can be any naturally occurring amino acid
  SITE 6: note = misc_feature - Xaa can be any naturally occurring amino acid
  SITE 8: note = misc_feature - Xaa can be any naturally occurring amino acid
  REGION 10..14: note = misc_feature - Xaa can be any naturally occurring amino acid
XYXXPXQXIXXXXXQ

SEQ ID NO: 1482 - protein, 10 aa, synthetic construct
  REGION 1..10: note = epitope
YLQPQQPISQ

SEQ ID NO: 1483 - protein, 9 aa, synthetic construct
  REGION 1..9: note = epitope
YLQPQQPIS

SEQ ID NO: 1484 - protein, 7 aa, synthetic construct
  REGION 1..7: note = epitope
YLQPQQP

SEQ ID NO: 1485 - protein, 5 aa, synthetic construct
  REGION 1..5: note = epitope
SQQQA

SEQ ID NO: 1486 - protein, 15 aa, synthetic construct
  REGION 1..15: note = epitope
  SITE 1: note = misc_feature - Xaa can be any naturally occurring amino acid
  REGION 3..6: note = misc_feature - Xaa can be any naturally occurring amino acid
  SITE 8: note = misc_feature - Xaa can be any naturally occurring amino acid
  SITE 10: note = misc_feature - Xaa can be any naturally occurring amino acid
  SITE 14: note = misc_feature - Xaa can be any naturally occurring amino acid
XYXXXXQXIXQQQXQ

SEQ ID NO: 1487 - protein, 10 aa, synthetic construct
  REGION 1..10: note = epitope
YLQPQQPISQ

SEQ ID NO: 1488 - protein, 9 aa, synthetic construct
  REGION 1..9: note = epitope
YLQPQQPIS

SEQ ID NO: 1489 - protein, 10 aa, synthetic construct
  REGION 1..10: note = epitope
QQPISQQQAQ

SEQ ID NO: 1490 - protein, 10 aa, synthetic construct
  REGION 1..10: note = epitope
  SITE 1: note = misc_feature - Xaa can be any naturally occurring amino acid
  SITE 3: note = misc_feature - Xaa can be any naturally occurring amino acid
  SITE 5: note = misc_feature - Xaa can be any naturally occurring amino acid
  SITE 9: note = misc_feature - Xaa can be any naturally occurring amino acid
XQXIXQQQXQ

SEQ ID NO: 1491 - protein, 15 aa, synthetic construct
  REGION 1..15: note = epitope
  SITE 1: note = misc_feature - Xaa can be any naturally occurring amino acid
  REGION 3..6: note = misc_feature - Xaa can be any naturally occurring amino acid
  REGION 8..9: note = misc_feature - Xaa can be any naturally occurring amino acid
  SITE 11: note = misc_feature - Xaa can be any naturally occurring amino acid
  SITE 14: note = misc_feature - Xaa can be any naturally occurring amino acid
XYXXXXQXXSXQQXQ

SEQ ID NO: 1492 - protein, 10 aa, synthetic construct
  REGION 1..10: note = epitope
YLQPQQPISQ

SEQ ID NO: 1493 - protein, 9 aa, synthetic construct
  REGION 1..9: note = epitope
YLQPQQPIS

SEQ ID NO: 1494 - protein, 10 aa, synthetic construct
  REGION 1..10: note = epitope
YLQPQQPISQ

SEQ ID NO: 1495 - protein, 8 aa, synthetic construct
  REGION 1..8: note = epitope
YLQPQQPI

SEQ ID NO: 1496 - protein, 15 aa, synthetic construct
  REGION 1..15: note = epitope
  REGION 1..4: note = misc_feature - Xaa can be any naturally occurring amino acid
  SITE 8: note = misc_feature - Xaa can be any naturally occurring amino acid
  REGION 10..12: note = misc_feature - Xaa can be any naturally occurring amino acid
XXXXPQQXIXXXQAQ

SEQ ID NO: 1497 - protein, 15 aa, synthetic construct
  REGION 1..15: note = epitope
  REGION 1..4: note = misc_feature - Xaa can be any naturally occurring amino acid
  SITE 6: note = misc_feature - Xaa can be any naturally occurring amino acid
  SITE 8: note = misc_feature - Xaa can be any naturally occurring amino acid
  REGION 10..12: note = misc_feature - Xaa can be any naturally occurring amino acid
XXXXPXQXIXXXQAQ

SEQ ID NO: 1498 - protein, 15 aa, synthetic construct
  REGION 1..15: note = epitope
  REGION 1..6: note = misc_feature - Xaa can be any naturally occurring amino acid
  SITE 8: note = misc_feature - Xaa can be any naturally occurring amino acid
  REGION 10..13: note = misc_feature - Xaa can be any naturally occurring amino acid
XXXXXXQXIXXXXAQ

SEQ ID NO: 1499 - protein, 10 aa, synthetic construct
  REGION 1..10: note = epitope
YLQPQQPISQ

SEQ ID NO: 1500 - protein, 9 aa, synthetic construct
  REGION 1..9: note = epitope
YLQPQQPIS

SEQ ID NO: 1501 - protein, 9 aa, synthetic construct
  REGION 1..9: note = epitope
  REGION 1..3: note = misc_feature - Xaa can be any naturally occurring amino acid
  SITE 7: note = misc_feature - Xaa can be any naturally occurring amino acid
  SITE 9: note = misc_feature - Xaa can be any naturally occurring amino acid
XXXPQQXIX

SEQ ID NO: 1502 - protein, 6 aa, synthetic construct
  REGION 1..6: note = epitope
LQPQQP

SEQ ID NO: 1503 - protein, 8 aa, synthetic construct
  REGION 1..8: note = epitope
QPISQQQA

SEQ ID NO: 1504 - protein, 8 aa, synthetic construct
  REGION 1..8: note = epitope
  SITE 2: note = misc_feature - Xaa can be any naturally occurring amino acid
  REGION 4..6: note = misc_feature - Xaa can be any naturally occurring amino acid
QXIXXXQA

SEQ ID NO: 1505 - protein, 5 aa, synthetic construct
  REGION 1..5: note = epitope
SQQQA

SEQ ID NO: 1506 - protein, 7 aa, synthetic construct
  REGION 1..7: note = epitope
YLQPQQP

SEQ ID NO: 1507 - protein, 5 aa, synthetic construct
  REGION 1..5: note = epitope
YLQPQ

SEQ ID NO: 1508 - protein, 15 aa, synthetic construct
  REGION 1..15: note = epitope
QVPLVQQQQFLGQQQ

SEQ ID NO: 1509 - protein, 7 aa, synthetic construct
  REGION 1..7: note = epitope
QVPLVQQ

SEQ ID NO: 1510 - protein, 7 aa, synthetic construct
  REGION 1..7: note = epitope
  REGION 2..3: note = misc_feature - Xaa can be any naturally occurring amino acid
QXXLVQQ

SEQ ID NO: 1511 - protein, 15 aa, synthetic construct
  REGION 1..15: note = epitope
  SITE 14: note = misc_feature - Xaa can be any naturally occurring amino acid
QVPLVQQQQFLGQXQ

SEQ ID NO: 1512 - protein, 15 aa, synthetic construct
  REGION 1..15: note = epitope
  SITE 11: note = misc_feature - Xaa can be any naturally occurring amino acid
  REGION 14..15: note = misc_feature - Xaa can be any naturally occurring amino acid
QVPLVQQQQFXGQXX

SEQ ID NO: 1513 - protein, 15 aa, synthetic construct
  REGION 1..15: note = epitope
  SITE 1: note = misc_feature - Xaa can be any naturally occurring amino acid
  REGION 10..12: note = misc_feature - Xaa can be any naturally occurring amino acid
  REGION 14..15: note = misc_feature - Xaa can be any naturally occurring amino acid
XVPLVQQQQXXXQXX

SEQ ID NO: 1514 - protein, 9 aa, synthetic construct
  REGION 1..9: note = epitope
QVPLVQQQQ

SEQ ID NO: 1515 - protein, 9 aa, synthetic construct
  REGION 1..9: note = epitope
  SITE 1: note = misc_feature - Xaa can be any naturally occurring amino acid
XVPLVQQQQ

SEQ ID NO: 1516 - protein, 15 aa, synthetic construct
  REGION 1..15: note = epitope
  REGION 2..4: note = misc_feature - Xaa can be any naturally occurring amino acid
  REGION 8..13: note = misc_feature - Xaa can be any naturally occurring amino acid
QXXXVQQXXXXXXQQ

SEQ ID NO: 1517 - protein, 15 aa, synthetic construct
  REGION 1..15: note = epitope
  REGION 2..4: note = misc_feature - Xaa can be any naturally occurring amino acid
  REGION 8..13: note = misc_feature - Xaa can be any naturally occurring amino acid
  SITE 15: note = misc_feature - Xaa can be any naturally occurring amino acid
QXXXVQQXXXXXXQX

SEQ ID NO: 1518 - protein, 7 aa, synthetic construct
  REGION 1..7: note = epitope
QVPLVQQ

SEQ ID NO: 1519 - protein, 7 aa, synthetic construct
  REGION 1..7: note = epitope
  REGION 2..4: note = misc_feature - Xaa can be any naturally occurring amino acid
QXXXVQQ

SEQ ID NO: 1520 - protein, 7 aa, synthetic construct
  REGION 1..7: note = epitope
QVPLVQQ

SEQ ID NO: 1521 - protein, 7 aa, synthetic construct
  REGION 1..7: note = epitope
  REGION 2..3: note = misc_feature - Xaa can be any naturally occurring amino acid
QXXLVQQ

SEQ ID NO: 1522 - protein, 15 aa, synthetic construct
  REGION 1..15: note = epitope
  REGION 1..4: note = misc_feature - Xaa can be any naturally occurring amino acid
  REGION 8..13: note = misc_feature - Xaa can be any naturally occurring amino acid
XXXXVQQXXXXXXQQ

SEQ ID NO: 1523 - protein, 10 aa, synthetic construct
  REGION 1..10: note = epitope
QVPLVQQQQF

SEQ ID NO: 1524 - protein, 9 aa, synthetic construct
  REGION 1..9: note = epitope
QVPLVQQQQ

SEQ ID NO: 1525 - protein, 9 aa, synthetic construct
  REGION 1..9: note = epitope
LVQQQQFLG

SEQ ID NO: 1526 - protein, 4 aa, synthetic construct
  REGION 1..4: note = epitope
VQQQ

SEQ ID NO: 1527 - protein, 9 aa, synthetic construct
  REGION 1..9: note = epitope
QVPLVQQQQ

SEQ ID NO: 1528 - protein, 7 aa, synthetic construct
  REGION 1..7: note = epitope
QVPLVQQ

SEQ ID NO: 1529 - protein, 7 aa, synthetic construct
  REGION 1..7: note = epitope
  REGION 2..3: note = misc_feature - Xaa can be any naturally occurring amino acid
QXXLVQQ

SEQ ID NO: 1530 - protein, 15 aa, synthetic construct
  REGION 1..15: note = epitope
  REGION 1..4: note = misc_feature - Xaa can be any naturally occurring amino acid
  SITE 11: note = misc_feature - Xaa can be any naturally occurring amino acid
XXXXVQQQQFXGQQQ

SEQ ID NO: 1531 - protein, 15 aa, synthetic construct
  REGION 1..15: note = epitope
  REGION 1..4: note = misc_feature - Xaa can be any naturally occurring amino acid
  REGION 9..12: note = misc_feature - Xaa can be any naturally occurring amino acid
XXXXVQQQXXXXQQQ

SEQ ID NO: 1532 - protein, 8 aa, synthetic construct
  REGION 1..8: note = epitope
QVPLVQQQ

SEQ ID NO: 1533 - protein, 8 aa, synthetic construct
  REGION 1..8: note = epitope
  REGION 1..4: note = misc_feature - Xaa can be any naturally occurring amino acid
XXXXVQQQ

SEQ ID NO: 1534 - protein, 7 aa, synthetic construct
  REGION 1..7: note = epitope
QQQQFLG

SEQ ID NO: 1535 - protein, 7 aa, synthetic construct
  REGION 1..7: note = epitope
  SITE 6: note = misc_feature - Xaa can be any naturally occurring amino acid
QQQQFXG

SEQ ID NO: 1536 - protein, 15 aa, synthetic construct
  REGION 1..15: note = epitope
  REGION 2..3: note = misc_feature - Xaa can be any naturally occurring amino acid
  REGION 8..11: note = misc_feature - Xaa can be any naturally occurring amino acid
  REGION 14..15: note = misc_feature - Xaa can be any naturally occurring amino acid
QXXLVQQXXXXGQXX

SEQ ID NO: 1537 - protein, 15 aa, synthetic construct
  REGION 1..15: note = epitope
  REGION 1..4: note = misc_feature - Xaa can be any naturally occurring amino acid
  REGION 8..11: note = misc_feature - Xaa can be any naturally occurring amino acid
  REGION 14..15: note = misc_feature - Xaa can be any naturally occurring amino acid
XXXXVQQXXXXGQXX

SEQ ID NO: 1538 - protein, 10 aa, synthetic construct
  REGION 1..10: note = epitope
LVQQQQFLGQ

SEQ ID NO: 1539 - protein, 9 aa, synthetic construct
  REGION 1..9: note = epitope
LVQQQQFLG

SEQ ID NO: 1540 - protein, 8 aa, synthetic construct
  REGION 1..8: note = epitope
VQQQQFLG

SEQ ID NO: 1541 - protein, 8 aa, synthetic construct
  REGION 1..8: note = epitope
  REGION 4..7: note = misc_feature - Xaa can be any naturally occurring amino acid
VQQXXXXG

SEQ ID NO: 1542 - protein, 9 aa, synthetic construct
  REGION 1..9: note = epitope
QVPLVQQQQ

SEQ ID NO: 1543 - protein, 7 aa, synthetic construct
  REGION 1..7: note = epitope
QVPLVQQ

SEQ ID NO: 1544 - protein, 7 aa, synthetic construct
  REGION 1..7: note = epitope
  REGION 2..4: note = misc_feature - Xaa can be any naturally occurring amino acid
QXXXVQQ

SEQ ID NO: 1545 - protein, 15 aa, synthetic construct
  REGION 1..15: note = epitope
  REGION 1..2: note = misc_feature - Xaa can be any naturally occurring amino acid
  SITE 6: note = misc_feature - Xaa can be any naturally occurring amino acid
  SITE 10: note = misc_feature - Xaa can be any naturally occurring amino acid
XXPLVXQQQXLGQQQ

SEQ ID NO: 1546 - protein, 15 aa, synthetic construct
  REGION 1..15: note = epitope
  REGION 1..6: note = misc_feature - Xaa can be any naturally occurring amino acid
  SITE 10: note = misc_feature - Xaa can be any naturally occurring amino acid
  SITE 15: note = misc_feature - Xaa can be any naturally occurring amino acid
XXXXXXQQQXLGQQX

SEQ ID NO: 1547 - protein, 9 aa, synthetic construct
  REGION 1..9: note = epitope
QVPLVQQQQ

SEQ ID NO: 1548 - protein, 8 aa, synthetic construct
  REGION 1..8: note = epitope
QVPLVQQQ

SEQ ID NO: 1549 - protein, 8 aa, synthetic construct
  REGION 1..8: note = epitope
  REGION 1..2: note = misc_feature - Xaa can be any naturally occurring amino acid
  SITE 6: note = misc_feature - Xaa can be any naturally occurring amino acid
XXPLVXQQ

SEQ ID NO: 1550 - protein, 10 aa, synthetic construct
  REGION 1..10: note = epitope
LVQQQQFLGQ

SEQ ID NO: 1551 - protein, 8 aa, synthetic construct
  REGION 1..8: note = epitope
QQQQFLGQ

SEQ ID NO: 1552 - protein, 8 aa, synthetic construct
  REGION 1..8: note = epitope
  SITE 1: note = misc_feature - Xaa can be any naturally occurring amino acid
  SITE 5: note = misc_feature - Xaa can be any naturally occurring amino acid
XQQQXLGQ

SEQ ID NO: 1553 - protein, 15 aa, synthetic construct
  REGION 1..15: note = epitope
  SITE 2: note = misc_feature - Xaa can be any naturally occurring amino acid
  SITE 8: note = misc_feature - Xaa can be any naturally occurring amino acid
QXPLVQQXQFLGQQQ

SEQ ID NO: 1554 - protein, 15 aa, synthetic construct
  REGION 1..15: note = epitope
  REGION 1..3: note = misc_feature - Xaa can be any naturally occurring amino acid
  REGION 8..11: note = misc_feature - Xaa can be any naturally occurring amino acid
XXXLVQQXXXXGQQQ

SEQ ID NO: 1555 - protein, 8 aa, synthetic construct
  REGION 1..8: note = epitope
QVPLVQQQ

SEQ ID NO: 1556 - protein, 5 aa, synthetic construct
  REGION 1..5: note = epitope
LVQQQ

SEQ ID NO: 1557 - protein, 10 aa, synthetic construct
  REGION 1..10: note = epitope
QVPLVQQQQF

SEQ ID NO: 1558 - protein, 8 aa, synthetic construct
  REGION 1..8: note = epitope
PLVQQQQF

SEQ ID NO: 1559 - protein, 9 aa, synthetic construct
  REGION 1..9: note = epitope
  SITE 1: note = misc_feature - Xaa can be any naturally occurring amino acid
  SITE 3: note = misc_feature - Xaa can be any naturally occurring amino acid
  REGION 5..6: note = misc_feature - Xaa can be any naturally occurring amino acid
  SITE 8: note = misc_feature - Xaa can be any naturally occurring amino acid
XPXVXXQXF

SEQ ID NO: 1560 - protein, 8 aa, synthetic construct
  REGION 1..8: note = epitope
QQQFLGQQ

SEQ ID NO: 1561 - protein, 15 aa, synthetic construct
  REGION 1..15: note = epitope
  SITE 1: note = misc_feature - Xaa can be any naturally occurring amino acid
XVPLVQQQQFLGQQQ

SEQ ID NO: 1562 - protein, 10 aa, synthetic construct
  REGION 1..10: note = epitope
QVPLVQQQQF

SEQ ID NO: 1563 - protein, 9 aa, synthetic construct
  REGION 1..9: note = epitope
QVPLVQQQQ

SEQ ID NO: 1564 - protein, 9 aa, synthetic construct
  REGION 1..9: note = epitope
  SITE 1: note = misc_feature - Xaa can be any naturally occurring amino acid
XVPLVQQQQ

SEQ ID NO: 1565 - protein, 8 aa, synthetic construct
  REGION 1..8: note = epitope
QQQQFLGQ

SEQ ID NO: 1566 - protein, 15 aa, synthetic construct
  REGION 1..15: note = epitope
PQQPQQPFPQTQQPQ

SEQ ID NO: 1567 - protein, 7 aa, synthetic construct
  REGION 1..7: note = epitope
PFPQTQQ

SEQ ID NO: 1568 - protein, 6 aa, synthetic construct
  REGION 1..6: note = epitope
PFPQTQ

SEQ ID NO: 1569 - protein, 15 aa, synthetic construct
  REGION 1..15: note = epitope
  REGION 1..9: note = misc_feature - Xaa can be any naturally occurring amino acid
  REGION 14..15: note = misc_feature - Xaa can be any naturally occurring amino acid
XXXXXXXXXQTQQXX

SEQ ID NO: 1570 - protein, 15 aa, synthetic construct
  REGION 1..15: note = epitope
  SITE 4: note = misc_feature - Xaa can be any naturally occurring amino acid
  SITE 14: note = misc_feature - Xaa can be any naturally occurring amino acid
PQQXQQPFPQTQQXQ

SEQ ID NO: 1571 - protein, 15 aa, synthetic construct
  REGION 1..15: note = epitope
  SITE 4: note = misc_feature - Xaa can be any naturally occurring amino acid
  REGION 13..15: note = misc_feature - Xaa can be any naturally occurring amino acid
PQQXQQPFPQTQXXX

SEQ ID NO: 1572 - protein, 15 aa, synthetic construct
  REGION 1..15: note = epitope
  SITE 4: note = misc_feature - Xaa can be any naturally occurring amino acid
  REGION 12..15: note = misc_feature - Xaa can be any naturally occurring amino acid
PQQXQQPFPQTXXXX

SEQ ID NO: 1573 - protein, 9 aa, synthetic construct
  REGION 1..9: note = epitope
PQQPQQPFP

SEQ ID NO: 1574 - protein, 9 aa, synthetic construct
  REGION 1..9: note = epitope
  SITE 4: note = misc_feature - Xaa can be any naturally occurring amino acid
PQQXQQPFP

SEQ ID NO: 1575 - protein, 5 aa, synthetic construct
  REGION 1..5: note = epitope
QQPQQ

SEQ ID NO: 1576 - protein, 5 aa, synthetic construct
  REGION 1..5: note = epitope
  SITE 3: note = misc_feature - Xaa can be any naturally occurring amino acid
QQXQQ

SEQ ID NO: 1577 - protein, 7 aa, synthetic construct
  REGION 1..7: note = epitope
PFPQTQQ

SEQ ID NO: 1578 - protein, 7 aa, synthetic construct
  REGION 1..7: note = epitope
  SITE 7: note = misc_feature - Xaa can be any naturally occurring amino acid
PFPQTQX

SEQ ID NO: 1579 - protein, 7 aa, synthetic construct
  REGION 1..7: note = epitope
  REGION 6..7: note = misc_feature - Xaa can be any naturally occurring amino acid
PFPQTXX

SEQ ID NO: 1580 - protein, 10 aa, synthetic construct
  REGION 1..10: note = epitope
QPFPQTQQPQ

SEQ ID NO: 1581 - protein, 9 aa, synthetic construct
  REGION 1..9: note = epitope
PFPQTQQPQ

SEQ ID NO: 1582 - protein, 8 aa, synthetic construct
  REGION 1..8: note = epitope
FPQTQQPQ

SEQ ID NO: 1583 - protein, 8 aa, synthetic construct
  REGION 1..8: note = epitope
  REGION 1..3: note = misc_feature - Xaa can be any naturally occurring amino acid
  SITE 7: note = misc_feature - Xaa can be any naturally occurring amino acid
XXXTQQXQ

SEQ ID NO: 1584 - protein, 15 aa, synthetic construct
  REGION 1..15: note = epitope
  REGION 1..9: note = misc_feature - Xaa can be any naturally occurring amino acid
XXXXXXXXXQTQQPQ

SEQ ID NO: 1585 - protein, 15 aa, synthetic construct
  REGION 1..15: note = epitope
  REGION 1..9: note = misc_feature - Xaa can be any naturally occurring amino acid
  SITE 14: note = misc_feature - Xaa can be any naturally occurring amino acid
XXXXXXXXXQTQQXQ

SEQ ID NO: 1586 - protein, 10 aa, synthetic construct
  REGION 1..10: note = epitope
QQPFPQTQQP

SEQ ID NO: 1587 - protein, 10 aa, synthetic construct
  REGION 1..10: note = epitope
  REGION 1..5: note = misc_feature - Xaa can be any naturally occurring amino acid
XXXXXQTQQP

SEQ ID NO: 1588 - protein, 10 aa, synthetic construct
  REGION 1..10: note = epitope
  REGION 1..5: note = misc_feature - Xaa can be any naturally occurring amino acid
  SITE 10: note = misc_feature - Xaa can be any naturally occurring amino acid
XXXXXQTQQX

SEQ ID NO: 1589 - protein, 15 aa, synthetic construct
  REGION 1..15: note = epitope
  REGION 1..5: note = misc_feature - Xaa can be any naturally occurring amino acid
  REGION 9..14: note = misc_feature - Xaa can be any naturally occurring amino acid
XXXXXQPFXXXXXXQ

SEQ ID NO: 1590 - protein, 10 aa, synthetic construct
  REGION 1..10: note = epitope
QPFPQTQQPQ

SEQ ID NO: 1591 - protein, 9 aa, synthetic construct
  REGION 1..9: note = epitope
QPFPQTQQP

SEQ ID NO: 1592 - protein, 15 aa, synthetic construct
  REGION 1..15: note = epitope
  REGION 1..2: note = misc_feature - Xaa can be any naturally occurring amino acid
  SITE 5: note = misc_feature - Xaa can be any naturally occurring amino acid
XXQPXQPFPQTQQPQ

SEQ ID NO: 1593 - protein, 8 aa, synthetic construct
  REGION 1..8: note = epitope
QPQQPFPQ

SEQ ID NO: 1594 - protein, 7 aa, synthetic construct
  REGION 1..7: note = epitope
QPQQPFP

SEQ ID NO: 1595 - protein, 6 aa, synthetic construct
  REGION 1..6: note = epitope
QPQQPF

SEQ ID NO: 1596 - protein, 6 aa, synthetic construct
  REGION 1..6: note = epitope
  SITE 3: note = misc_feature - Xaa can be any naturally occurring amino acid
QPXQPF

SEQ ID NO: 1597 - protein, 6 aa, synthetic construct
  REGION 1..6: note = epitope
  REGION 2..3: note = misc_feature - Xaa can be any naturally occurring amino acid
QXXQPF

SEQ ID NO: 1598 - protein, 15 aa, synthetic construct
  REGION 1..15: note = epitope
PQQPAQLEAIRSLVL

SEQ ID NO: 1599 - protein, 15 aa, synthetic construct
  REGION 1..15: note = epitope
  REGION 3..4: note = misc_feature - Xaa can be any naturally occurring amino acid
  REGION 8..9: note = misc_feature - Xaa can be any naturally occurring amino acid
  SITE 13: note = misc_feature - Xaa can be any naturally occurring amino acid
PQXXAQLXXIRSXVL

SEQ ID NO: 1600 - protein, 15 aa, synthetic construct
  REGION 1..15: note = epitope
  REGION 1..4: note = misc_feature - Xaa can be any naturally occurring amino acid
  REGION 8..9: note = misc_feature - Xaa can be any naturally occurring amino acid
  SITE 13: note = misc_feature - Xaa can be any naturally occurring amino acid
XXXXAQLXXIRSXVL

SEQ ID NO: 1601 - protein, 9 aa, synthetic construct
  REGION 1..9: note = epitope
AQLEAIRSL

SEQ ID NO: 1602 - protein, 9 aa, synthetic construct
  REGION 1..9: note = epitope
  REGION 4..5: note = misc_feature - Xaa can be any naturally occurring amino acid
  SITE 9: note = misc_feature - Xaa can be any naturally occurring amino acid
AQLXXIRSX

SEQ ID NO: 1603 - protein, 15 aa, synthetic construct
  REGION 1..15: note = epitope
  SITE 1: note = misc_feature - Xaa can be any naturally occurring amino acid
  SITE 8: note = misc_feature - Xaa can be any naturally occurring amino acid
XQQPAQLXAIRSLVL

SEQ ID NO: 1604 - protein, 15 aa, synthetic construct
  REGION 1..15: note = epitope
  SITE 1: note = misc_feature - Xaa can be any naturally occurring amino acid
  REGION 8..9: note = misc_feature - Xaa can be any naturally occurring amino acid
  SITE 13: note = misc_feature - Xaa can be any naturally occurring amino acid
  SITE 15: note = misc_feature - Xaa can be any naturally occurring amino acid
XQQPAQLXXIRSXVX

SEQ ID NO: 1605 - protein, 8 aa, synthetic construct
  REGION 1..8: note = epitope
AQLEAIRS

SEQ ID NO: 1606 - protein, 8 aa, synthetic construct
  REGION 1..8: note = epitope
  SITE 4: note = misc_feature - Xaa can be any naturally occurring amino acid
AQLXAIRS

SEQ ID NO: 1607 - protein, 8 aa, synthetic construct
  REGION 1..8: note = epitope
  REGION 4..5: note = misc_feature - Xaa can be any naturally occurring amino acid
AQLXXIRS

SEQ ID NO: 1608 - protein, 15 aa, synthetic construct
  REGION 1..15: note = epitope
VGYNPDKVPFVPISG

SEQ ID NO: 1609 - protein, 15 aa, synthetic construct
  REGION 1..15: note = epitope
  SITE 1: note = misc_feature - Xaa can be any naturally occurring amino acid
  REGION 4..5: note = misc_feature - Xaa can be any naturally occurring amino acid
  REGION 10..11: note = misc_feature - Xaa can be any naturally occurring amino acid
  REGION 13..15: note = misc_feature - Xaa can be any naturally occurring amino acid
XGYXXDKVPXXPXXX

SEQ ID NO: 1610 - protein, 15 aa, synthetic construct
  REGION 1..15: note = epitope
  SITE 1: note = misc_feature - Xaa can be any naturally occurring amino acid
  REGION 4..5: note = misc_feature - Xaa can be any naturally occurring amino acid
  REGION 8..15: note = misc_feature - Xaa can be any naturally occurring amino acid
XGYXXDKXXXXXXXX

SEQ ID NO: 1611 - protein, 4 aa, synthetic construct
  REGION 1..4: note = epitope
YNPD

SEQ ID NO: 1612 - protein, 15 aa, synthetic construct
  REGION 1..15: note = epitope
  SITE 1: note = misc_feature - Xaa can be any naturally occurring amino acid
  SITE 4: note = misc_feature - Xaa can be any naturally occurring amino acid
  REGION 9..15: note = misc_feature - Xaa can be any naturally occurring amino acid
XGYXPDKVXXXXXXX

SEQ ID NO: 1613 - protein, 4 aa, synthetic construct
  REGION 1..4: note = epitope
YNPD

SEQ ID NO: 1614 - protein, 4 aa, synthetic construct
  REGION 1..4: note = epitope
YNPD

SEQ ID NO: 1615 - protein, 4 aa, synthetic construct
  REGION 1..4: note = epitope
YNPD

SEQ ID NO: 1616 - protein, 6 aa, synthetic construct
  REGION 1..6: note = epitope
FVPISG

SEQ ID NO: 1617 - protein, 8 aa, synthetic construct
  REGION 1..8: note = epitope
VPFVPISG

SEQ ID NO: 1618 - protein, 6 aa, synthetic construct
  REGION 1..6: note = epitope
FVPISG

SEQ ID NO: 1619 - protein, 6 aa, synthetic construct
  REGION 1..6: note = epitope
FVPISG

SEQ ID NO: 1620 - protein, 6 aa, synthetic construct
  REGION 1..6: note = epitope
YNPDKV

SEQ ID NO: 1621 - protein, 4 aa, synthetic construct
  REGION 1..4: note = epitope
YNPD

SEQ ID NO: 1622 - protein, 15 aa, synthetic construct
  REGION 1..15: note = epitope
  REGION 4..6: note = misc_feature - Xaa can be any naturally occurring amino acid
  REGION 8..15: note = misc_feature - Xaa can be any naturally occurring amino acid
VGYXXXKXXXXXXXX

SEQ ID NO: 1623 - protein, 4 aa, synthetic construct
  REGION 1..4: note = epitope
YNPD

SEQ ID NO: 1624 - protein, 6 aa, synthetic construct
  REGION 1..6: note = epitope
FVPISG

SEQ ID NO: 1625 - protein, 15 aa, synthetic construct
  REGION 1..15: note = epitope
  SITE 1: note = misc_feature - Xaa can be any naturally occurring amino acid
  REGION 4..6: note = misc_feature - Xaa can be any naturally occurring amino acid
  REGION 9..15: note = misc_feature - Xaa can be any naturally occurring amino acid
XGYXXXKVXXXXXXX

SEQ ID NO: 1626 - protein, 4 aa, synthetic construct
  REGION 1..4: note = epitope
YNPD

SEQ ID NO: 1627 - protein, 15 aa, synthetic construct
  REGION 1..15: note = epitope
  SITE 1: note = misc_feature - Xaa can be any naturally occurring amino acid
  REGION 4..5: note = misc_feature - Xaa can be any naturally occurring amino acid
  REGION 8..15: note = misc_feature - Xaa can be any naturally occurring amino acid
XGYXXDKXXXXXXXX

SEQ ID NO: 1628 - protein, 7 aa, synthetic construct
  REGION 1..7: note = epitope
YNPDKVP

SEQ ID NO: 1629 - protein, 4 aa, synthetic construct
  REGION 1..4: note = epitope
YNPD

SEQ ID NO: 1630 - protein, 10 aa, synthetic construct
  REGION 1..10: note = epitope
PDKVPFVPIS

SEQ ID NO: 1631 - protein, 10 aa, synthetic construct
  REGION 1..10: note = epitope
DKVPFVPISG

SEQ ID NO: 1632 - protein, 4 aa, synthetic construct
  REGION 1..4: note = epitope
YNPD

SEQ ID NO: 1633 - protein, 4 aa, synthetic construct
  REGION 1..4: note = epitope
YNPD

SEQ ID NO: 1634 - protein, 8 aa, synthetic construct
  REGION 1..8: note = epitope
YNPDKVPF

SEQ ID NO: 1635 - protein, 4 aa, synthetic construct
  REGION 1..4: note = epitope
YNPD

SEQ ID NO: 1636 - protein, 15 aa, synthetic construct
  REGION 1..15: note = epitope
  SITE 1: note = misc_feature - Xaa can be any naturally occurring amino acid
  REGION 4..6: note = misc_feature - Xaa can be any naturally occurring amino acid
  SITE 9: note = misc_feature - Xaa can be any naturally occurring amino acid
  SITE 11: note = misc_feature - Xaa can be any naturally occurring amino acid
  REGION 13..15: note = misc_feature - Xaa can be any naturally occurring amino acid
XGYXXXKVXFXPXXX

SEQ ID NO: 1637 - protein, 8 aa, synthetic construct
  REGION 1..8: note = epitope
YNPDKVPF

SEQ ID NO: 1638 - protein, 15 aa, synthetic construct
  REGION 1..15: note = epitope
  REGION 1..2: note = misc_feature - Xaa can be any naturally occurring amino acid
  REGION 4..5: note = misc_feature - Xaa can be any naturally occurring amino acid
  REGION 9..15: note = misc_feature - Xaa can be any naturally occurring amino acid
XXYXXDKVXXXXXXX

SEQ ID NO: 1639 - protein, 6 aa, synthetic construct
  REGION 1..6: note = epitope
YNPDKV

SEQ ID NO: 1640 - protein, 10 aa, synthetic construct
  REGION 1..10: note = epitope
DKVPFVPISG

SEQ ID NO: 1641 - protein, 7 aa, synthetic construct
  REGION 1..7: note = epitope
YNPDKVP

SEQ ID NO: 1642 - protein, 4 aa, synthetic construct
  REGION 1..4: note = epitope
YNPD

SEQ ID NO: 1643 - protein, 10 aa, synthetic construct
  REGION 1..10: note = epitope
PDKVPFVPIS

SEQ ID NO: 1644 - protein, 15 aa, synthetic construct
  REGION 1..15: note = epitope
  REGION 1..2: note = misc_feature - Xaa can be any naturally occurring amino acid
  REGION 4..6: note = misc_feature - Xaa can be any naturally occurring amino acid
  REGION 9..12: note = misc_feature - Xaa can be any naturally occurring amino acid
  REGION 14..15: note = misc_feature - Xaa can be any naturally occurring amino acid
XXYXXXKVXXXXIXX

SEQ ID NO: 1645 - protein, 9 aa, synthetic construct
  REGION 1..9: note = epitope
YNPDKVPFV

SEQ ID NO: 1646 - protein, 8 aa, synthetic construct
  REGION 1..8: note = epitope
YNPDKVPF

SEQ ID NO: 1647 - protein, 4 aa, synthetic construct
  REGION 1..4: note = epitope
YNPD

SEQ ID NO: 1648 - protein, 6 aa, synthetic construct
  REGION 1..6: note = epitope
FVPISG

SEQ ID NO: 1649 - protein, 15 aa, synthetic construct
  REGION 1..15: note = epitope
  SITE 1: note = misc_feature - Xaa can be any naturally occurring amino acid
  REGION 4..6: note = misc_feature - Xaa can be any naturally occurring amino acid
  REGION 9..15: note = misc_feature - Xaa can be any naturally occurring amino acid
XGYXXXKVXXXXXXX

SEQ ID NO: 1650 - protein, 8 aa, synthetic construct
  REGION 1..8: note = epitope
YNPDKVPF

SEQ ID NO: 1651 - protein, 6 aa, synthetic construct
  REGION 1..6: note = epitope
NPDKVP

SEQ ID NO: 1652 - protein, 15 aa, synthetic construct
  REGION 1..15: note = epitope
  SITE 1: note = misc_feature - Xaa can be any naturally occurring amino acid
  REGION 4..5: note = misc_feature - Xaa can be any naturally occurring amino acid
  SITE 7: note = misc_feature - Xaa can be any naturally occurring amino acid
  REGION 9..10: note = misc_feature - Xaa can be any naturally occurring amino acid
  SITE 12: note = misc_feature - Xaa can be any naturally occurring amino acid
  REGION 14..15: note = misc_feature - Xaa can be any naturally occurring amino acid
XGYXXDXVXXVXIXX

SEQ ID NO: 1653 - protein, 9 aa, synthetic construct
  REGION 1..9: note = epitope
YNPDKVPFV

SEQ ID NO: 1654 - protein, 8 aa, synthetic construct
  REGION 1..8: note = epitope
YNPDKVPF

SEQ ID NO: 1655 - protein, 6 aa, synthetic construct
  REGION 1..6: note = epitope
FVPISG

SEQ ID NO: 1656 - protein, 8 aa, synthetic construct
  REGION 1..8: note = epitope
NPDKVPFV

SEQ ID NO: 1657 - protein, 8 aa, synthetic construct
  REGION 1..8: note = epitope
VPFVPISG

SEQ ID NO: 1658 - protein, 9 aa, synthetic construct
  REGION 1..9: note = epitope
KVPFVPISG

SEQ ID NO: 1659 - protein, 8 aa, synthetic construct
  REGION 1..8: note = epitope
YNPDKVPF

SEQ ID NO: 1660 - protein, 5 aa, synthetic construct
  REGION 1..5: note = epitope
YNPDK

SEQ ID NO: 1661 - protein, 6 aa, synthetic construct
  REGION 1..6: note = epitope
FVPISG

SEQ ID NO: 1662 - protein, 15 aa, synthetic construct
  REGION 1..15: note = epitope
  REGION 1..2: note = misc_feature - Xaa can be any naturally occurring amino acid
  REGION 4..5: note = misc_feature - Xaa can be any naturally occurring amino acid
  REGION 9..11: note = misc_feature - Xaa can be any naturally occurring amino acid
  REGION 13..15: note = misc_feature - Xaa can be any naturally occurring amino acid
XXYXXDKVXXXPXXX

SEQ ID NO: 1663 - protein, 9 aa, synthetic construct
  REGION 1..9: note = epitope
YNPDKVPFV

SEQ ID NO: 1664 - protein, 8 aa, synthetic construct
  REGION 1..8: note = epitope
YNPDKVPF

SEQ ID NO: 1665 - protein, 8 aa, synthetic construct
  REGION 1..8: note = epitope
VPFVPISG

SEQ ID NO: 1666 - protein, 7 aa, synthetic construct
  REGION 1..7: note = epitope
YNPDKVP

SEQ ID NO: 1667 - protein, 6 aa, synthetic construct
  REGION 1..6: note = epitope
NPDKVP

SEQ ID NO: 1668 - protein, 6 aa, synthetic construct
  REGION 1..6: note = epitope
FVPISG

SEQ ID NO: 1669 - protein, 10 aa, synthetic construct
  REGION 1..10: note = epitope
GYNPDKVPFV

SEQ ID NO: 1670 - protein, 9 aa, synthetic construct
  REGION 1..9: note = epitope
YNPDKVPFV

SEQ ID NO: 1671 - protein, 8 aa, synthetic construct
  REGION 1..8: note = epitope
YNPDKVPF

SEQ ID NO: 1672 - protein, 10 aa, synthetic construct
  REGION 1..10: note = epitope
PDKVPFVPIS

SEQ ID NO: 1673 - protein, 15 aa, synthetic construct
  REGION 1..15: note = epitope
  SITE 1: note = misc_feature - Xaa can be any naturally occurring amino acid
  REGION 4..5: note = misc_feature - Xaa can be any naturally occurring amino acid
  REGION 9..10: note = misc_feature - Xaa can be any naturally occurring amino acid
  REGION 13..14: note = misc_feature - Xaa can be any naturally occurring amino acid
XGYXXDKVXXVPXXG

SEQ ID NO: 1674 - protein, 15 aa, synthetic construct
  REGION 1..15: note = epitope
  REGION 1..5: note = misc_feature - Xaa can be any naturally occurring amino acid
  REGION 9..10: note = misc_feature - Xaa can be any naturally occurring amino acid
  REGION 13..14: note = misc_feature - Xaa can be any naturally occurring amino acid
XXXXXDKVXXVPXXG

SEQ ID NO: 1675 - protein, 15 aa, synthetic construct
  REGION 1..15: note = epitope
  REGION 1..5: note = misc_feature - Xaa can be any naturally occurring amino acid
  REGION 9..10: note = misc_feature - Xaa can be any naturally occurring amino acid
  REGION 13..15: note = misc_feature - Xaa can be any naturally occurring amino acid
XXXXXDKVXXVPXXX

SEQ ID NO: 1676 - protein, 9 aa, synthetic construct
  REGION 1..9: note = epitope
KVPFVPISG

SEQ ID NO: 1677 - protein, 7 aa, synthetic construct
  REGION 1..7: note = epitope
PFVPISG

SEQ ID NO: 1678 - protein, 15 aa, synthetic construct
  REGION 1..15: note = epitope
  REGION 1..2: note = misc_feature - Xaa can be any naturally occurring amino acid
  REGION 4..5: note = misc_feature - Xaa can be any naturally occurring amino acid
  REGION 10..11: note = misc_feature - Xaa can be any naturally occurring amino acid
  SITE 14: note = misc_feature - Xaa can be any naturally occurring amino acid
XXYXXDKVPXXPIXG

SEQ ID NO: 1679 - protein, 15 aa, synthetic construct
  REGION 1..15: note = epitope
  REGION 1..2: note = misc_feature - Xaa can be any naturally occurring amino acid
  REGION 4..5: note = misc_feature - Xaa can be any naturally occurring amino acid
  REGION 9..12: note = misc_feature - Xaa can be any naturally occurring amino acid
  REGION 14..15: note = misc_feature - Xaa can be any naturally occurring amino acid
XXYXXDKVXXXXIXX

SEQ ID NO: 1680 - protein, 8 aa, synthetic construct
  REGION 1..8: note = epitope
YNPDKVPF

SEQ ID NO: 1681 - protein, 5 aa, synthetic construct
  REGION 1..5: note = epitope
DKVPF

SEQ ID NO: 1682 - protein, 5 aa, synthetic construct
  REGION 1..5: note = epitope
  SITE 5: note = misc_feature - Xaa can be any naturally occurring amino acid
DKVPX

SEQ ID NO: 1683 - protein, 8 aa, synthetic construct
  REGION 1..8: note = epitope
YNPDKVPF

SEQ ID NO: 1684 - protein, 6 aa, synthetic construct
  REGION 1..6: note = epitope
FVPISG

SEQ ID NO: 1685 - protein, 15 aa, synthetic construct
  REGION 1..15: note = epitope
PAKEAANFTSQVIIM

SEQ ID NO: 1686 - protein, 15 aa, synthetic construct
  REGION 1..15: note = epitope
  SITE 2: note = misc_feature - Xaa can be any naturally occurring amino acid
  REGION 4..5: note = misc_feature - Xaa can be any naturally occurring amino acid
  REGION 8..15: note = misc_feature - Xaa can be any naturally occurring amino acid
PXKXXANXXXXXXXX

SEQ ID NO: 1687 - protein, 6 aa, synthetic construct
  REGION 1..6: note = epitope
EAANFT

SEQ ID NO: 1688 - protein, 4 aa, synthetic construct
  REGION 1..4: note = epitope
KEAA

SEQ ID NO: 1689 - protein, 6 aa, synthetic construct
  REGION 1..6: note = epitope
SQVIIM

SEQ ID NO: 1690 - protein, 6 aa, synthetic construct
  REGION 1..6: note = epitope
EAANFT

SEQ ID NO: 1691 - protein, 15 aa, synthetic construct
  REGION 1..15: note = epitope
  SITE 2: note = misc_feature - Xaa can be any naturally occurring amino acid
  SITE 4: note = misc_feature - Xaa can be any naturally occurring amino acid
  REGION 8..10: note = misc_feature - Xaa can be any naturally occurring amino acid
  REGION 12..14: note = misc_feature - Xaa can be any naturally occurring amino acid
PXKXAANXXXQXXXM

SEQ ID NO: 1692 - protein, 15 aa, synthetic construct
  REGION 1..15: note = epitope
  SITE 2: note = misc_feature - Xaa can be any naturally occurring amino acid
  SITE 4: note = misc_feature - Xaa can be any naturally occurring amino acid
  REGION 7..14: note = misc_feature - Xaa can be any naturally occurring amino acid
PXKXAAXXXXXXXXM

SEQ ID NO: 1693 - protein, 8 aa, synthetic construct
  REGION 1..8: note = epitope
KEAANFTS

SEQ ID NO: 1694 - protein, 7 aa, synthetic construct
  REGION 1..7: note = epitope
EAANFTS

SEQ ID NO: 1695 - protein, 6 aa, synthetic construct
  REGION 1..6: note = epitope
EAANFT

SEQ ID NO: 1696 - protein, 15 aa, synthetic construct
  REGION 1..15: note = epitope
  SITE 2: note = misc_feature - Xaa can be any naturally occurring amino acid
  REGION 4..5: note = misc_feature - Xaa can be any naturally occurring amino acid
  REGION 10..14: note = misc_feature - Xaa can be any naturally occurring amino acid
PXKXXANFTXXXXXM

SEQ ID NO: 1697 - protein, 15 aa, synthetic construct
  REGION 1..15: note = epitope
  REGION 1..2: note = misc_feature - Xaa can be any naturally occurring amino acid
  REGION 4..5: note = misc_feature - Xaa can be any naturally occurring amino acid
  REGION 10..15: note = misc_feature - Xaa can be any naturally occurring amino acid
XXKXXANFTXXXXXX

SEQ ID NO: 1698 - protein, 7 aa, synthetic construct
  REGION 1..7: note = epitope
KEAANFT

SEQ ID NO: 1699 - protein, 6 aa, synthetic construct
  REGION 1..6: note = epitope
EAANFT

SEQ ID NO: 1700 - protein, 6 aa, synthetic construct
  REGION 1..6: note = epitope
  REGION 1..2: note = misc_feature - Xaa can be any naturally occurring amino acid
XXANFT

SEQ ID NO: 1701 - protein, 6 aa, synthetic construct
  REGION 1..6: note = epitope
EAANFT

SEQ ID NO: 1702 - protein, 6 aa, synthetic construct
  REGION 1..6: note = epitope
SQVIIM

SEQ ID NO: 1703 - protein, 6 aa, synthetic construct
  REGION 1..6: note = epitope
EAANFT

SEQ ID NO: 1704 - protein, 6 aa, synthetic construct
  REGION 1..6: note = epitope
EAANFT

SEQ ID NO: 1705 - protein, 15 aa, synthetic construct
  REGION 1..15: note = epitope
  SITE 2: note = misc_feature - Xaa can be any naturally occurring amino acid
  REGION 7..14: note = misc_feature - Xaa can be any naturally occurring amino acid
PXKEAAXXXXXXXXM

SEQ ID NO: 1706 - protein, 6 aa, synthetic construct
  REGION 1..6: note = epitope
EAANFT

SEQ ID NO: 1707 - protein, 6 aa, synthetic construct
  REGION 1..6: note = epitope
SQVIIM

SEQ ID NO: 1708 - protein, 15 aa, synthetic construct
  REGION 1..15: note = epitope
  SITE 2: note = misc_feature - Xaa can be any naturally occurring amino acid
  SITE 9: note = misc_feature - Xaa can be any naturally occurring amino acid
  REGION 11..15: note = misc_feature - Xaa can be any naturally occurring amino acid
PXKEAANFXSXXXXX

SEQ ID NO: 1709 - protein, 15 aa, synthetic construct
  REGION 1..15: note = epitope
  REGION 1..2: note = misc_feature - Xaa can be any naturally occurring amino acid
  REGION 7..15: note = misc_feature - Xaa can be any naturally occurring amino acid
XXKEAAXXXXXXXXX

SEQ ID NO: 1710 - protein, 8 aa, synthetic construct
  REGION 1..8: note = epitope
KEAANFTS

SEQ ID NO: 1711 - protein, 7 aa, synthetic construct
  REGION 1..7: note = epitope
KEAANFT

SEQ ID NO: 1712 - protein, 5 aa, synthetic construct
  REGION 1..5: note = epitope
EAANF

SEQ ID NO: 1713 - protein, 15 aa, synthetic construct
  REGION 1..15: note = epitope
  SITE 2: note = misc_feature - Xaa can be any naturally occurring amino acid
  REGION 4..6: note = misc_feature - Xaa can be any naturally occurring amino acid
  REGION 8..9: note = misc_feature - Xaa can be any naturally occurring amino acid
  REGION 11..15: note = misc_feature - Xaa can be any naturally occurring amino acid
PXKXXXNXXSXXXXX

SEQ ID NO: 1714 - protein, 6 aa, synthetic construct
  REGION 1..6: note = epitope
KEAANF

SEQ ID NO: 1715 - protein, 4 aa, synthetic construct
  REGION 1..4: note = epitope
KEAA

SEQ ID NO: 1716 - protein, 6 aa, synthetic construct
  REGION 1..6: note = epitope
SQVIIM

SEQ ID NO: 1717 - protein, 15 aa, synthetic construct
  REGION 1..15: note = epitope
  REGION 1..2: note = misc_feature - Xaa can be any naturally occurring amino acid
  REGION 8..14: note = misc_feature - Xaa can be any naturally occurring amino acid
XXKEAANXXXXXXXM

SEQ ID NO: 1718 - protein, 6 aa, synthetic construct
  REGION 1..6: note = epitope
EAANFT

SEQ ID NO: 1719 - protein, 5 aa, synthetic construct
  REGION 1..5: note = epitope
EAANF

SEQ ID NO: 1720 - protein, 5 aa, synthetic construct
  REGION 1..5: note = epitope
  SITE 5: note = misc_feature - Xaa can be any naturally occurring amino acid
EAANX

SEQ ID NO: 1721 - protein, 15 aa, synthetic construct
  REGION 1..15: note = epitope
  SITE 2: note = misc_feature - Xaa can be any naturally occurring amino acid
  SITE 4: note = misc_feature - Xaa can be any naturally occurring amino acid
  REGION 6..9: note = misc_feature - Xaa can be any naturally occurring amino acid
  REGION 11..15: note = misc_feature - Xaa can be any naturally occurring amino acid
PXKXAXXXXSXXXXX

SEQ ID NO: 1722 - protein, 7 aa, synthetic construct
  REGION 1..7: note = epitope
KEAANFT

SEQ ID NO: 1723 - protein, 6 aa, synthetic construct
  REGION 1..6: note = epitope
KEAANF

SEQ ID NO: 1724 - protein, 15 aa, synthetic construct
  REGION 1..15: note = epitope
  SITE 5: note = misc_feature - Xaa can be any naturally occurring amino acid
  REGION 7..11: note = misc_feature - Xaa can be any naturally occurring amino acid
  REGION 13..15: note = misc_feature - Xaa can be any naturally occurring amino acid
PAKEXAXXXXXVXXX

SEQ ID NO: 1725 - protein, 15 aa, synthetic construct
  REGION 1..15: note = epitope
  SITE 2: note = misc_feature - Xaa can be any naturally occurring amino acid
  SITE 5: note = misc_feature - Xaa can be any naturally occurring amino acid
  REGION 7..15: note = misc_feature - Xaa can be any naturally occurring amino acid
PXKEXAXXXXXXXXX

SEQ ID NO: 1726 - protein, 8 aa, synthetic construct
  REGION 1..8: note = epitope
KEAANFTS

SEQ ID NO: 1727 - protein, 6 aa, synthetic construct
  REGION 1..6: note = epitope
KEAANF

SEQ ID NO: 1728 - protein, 6 aa, synthetic construct
  REGION 1..6: note = epitope
KEAANF

SEQ ID NO: 1729 - protein, 10 aa, synthetic construct
  REGION 1..10: note = epitope
ANFTSQVIIM

SEQ ID NO: 1730 - protein, 6 aa, synthetic construct
  REGION 1..6: note = epitope
SQVIIM

SEQ ID NO: 1731 - protein, 15 aa, synthetic construct
  REGION 1..15: note = epitope
  SITE 2: note = misc_feature - Xaa can be any naturally occurring amino acid
  REGION 6..15: note = misc_feature - Xaa can be any naturally occurring amino acid
PXKEAXXXXXXXXXX

SEQ ID NO: 1732 - protein, 4 aa, synthetic construct
  REGION 1..4: note = epitope
KEAA

SEQ ID NO: 1733 - protein, 15 aa, synthetic construct
  REGION 1..15: note = epitope
  REGION 1..2: note = misc_feature - Xaa can be any naturally occurring amino acid
  REGION 4..5: note = misc_feature - Xaa can be any naturally occurring amino acid
  REGION 7..8: note = misc_feature - Xaa can be any naturally occurring amino acid
  REGION 11..15: note = misc_feature - Xaa can be any naturally occurring amino acid
XXKXXAXXTSXXXXX

SEQ ID NO: 1734 - protein, 7 aa, synthetic construct
  REGION 1..7: note = epitope
KEAANFT

SEQ ID NO: 1735 - protein, 6 aa, synthetic construct
  REGION 1..6: note = epitope
EAANFT

SEQ ID NO: 1736 - protein, 15 aa, synthetic construct
  REGION 1..15: note = epitope
  REGION 1..2: note = misc_feature - Xaa can be any naturally occurring amino acid
  REGION 7..14: note = misc_feature - Xaa can be any naturally occurring amino acid
XXKEAAXXXXXXXXM

SEQ ID NO: 1737 - protein, 7 aa, synthetic construct
  REGION 1..7: note = epitope
KEAANFT

SEQ ID NO: 1738 - protein, 5 aa, synthetic construct
  REGION 1..5: note = epitope
EAANF

SEQ ID NO: 1739 - protein, 7 aa, synthetic construct
  REGION 1..7: note = epitope
KEAANFT

SEQ ID NO: 1740 - protein, 6 aa, synthetic construct
  REGION 1..6: note = epitope
KEAANF

SEQ ID NO: 1741 - protein, 6 aa, synthetic construct
  REGION 1..6: note = epitope
SQVIIM

SEQ ID NO: 1742 - protein, 5 aa, synthetic construct
  REGION 1..5: note = epitope
KEAAN

SEQ ID NO: 1743 - protein, 4 aa, synthetic construct
  REGION 1..4: note = epitope
EAAN

SEQ ID NO: 1744 - protein, 15 aa, synthetic construct
  REGION 1..15: note = epitope
  REGION 7..15: note = misc_feature - Xaa can be any naturally occurring amino acid
PAKEAAXXXXXXXXX

SEQ ID NO: 1745 - protein, 15 aa, synthetic construct
  REGION 1..15: note = epitope
  SITE 2: note = misc_feature - Xaa can be any naturally occurring amino acid
  SITE 4: note = misc_feature - Xaa can be any naturally occurring amino acid
  REGION 7..15: note = misc_feature - Xaa can be any naturally occurring amino acid
PXKXAAXXXXXXXXX

SEQ ID NO: 1746 - protein, 7 aa, synthetic construct
  REGION 1..7: note = epitope
EAANFTS

SEQ ID NO: 1747 - protein, 6 aa, synthetic construct
  REGION 1..6: note = epitope
EAANFT

SEQ ID NO: 1748 - protein, 15 aa, synthetic construct
  REGION 1..15: note = epitope
  SITE 2: note = misc_feature - Xaa can be any naturally occurring amino acid
  REGION 4..5: note = misc_feature - Xaa can be any naturally occurring amino acid
  REGION 7..9: note = misc_feature - Xaa can be any naturally occurring amino acid
  REGION 11..12: note = misc_feature - Xaa can be any naturally occurring amino acid
  REGION 14..15: note = misc_feature - Xaa can be any naturally occurring amino acid
PXKXXAXXXSXXIXX

SEQ ID NO: 1749 - protein, 6 aa, synthetic construct
  REGION 1..6: note = epitope
EAANFT

SEQ ID NO: 1750 - protein, 7 aa, synthetic construct
  REGION 1..7: note = epitope
KEAANFT

SEQ ID NO: 1751 - protein, 6 aa, synthetic construct
  REGION 1..6: note = epitope
SQVIIM

SEQ ID NO: 1752 - protein, 10 aa, synthetic construct
  REGION 1..10: note = epitope
ANFTSQVIIM

SEQ ID NO: 1753 - protein, 15 aa, synthetic construct
  REGION 1..15: note = epitope
VKEVSSYLKKVGYNP

SEQ ID NO: 1754 - protein, 15 aa, synthetic construct
  REGION 1..15: note = epitope
  REGION 1..5: note = misc_feature - Xaa can be any naturally occurring amino acid
  REGION 12..15: note = misc_feature - Xaa can be any naturally occurring amino acid
XXXXXSYLKKVXXXX

SEQ ID NO: 1755 - protein, 4 aa, synthetic construct
  REGION 1..4: note = epitope
YLKK

SEQ ID NO: 1756 - protein, 7 aa, synthetic construct
  REGION 1..7: note = epitope
VSSYLKK

SEQ ID NO: 1757 - protein, 6 aa, synthetic construct
  REGION 1..6: note = epitope
KVGYNP

SEQ ID NO: 1758 - protein, 4 aa, synthetic construct
  REGION 1..4: note = epitope
YLKK

SEQ ID NO: 1759 - protein, 4 aa, synthetic construct
  REGION 1..4: note = epitope
YLKK

SEQ ID NO: 1760 - protein, 9 aa, synthetic construct
  REGION 1..9: note = epitope
EVSSYLKKV

SEQ ID NO: 1761 - protein, 8 aa, synthetic construct
  REGION 1..8: note = epitope
YLKKVGYN

SEQ ID NO: 1762 - protein, 9 aa, synthetic construct
  REGION 1..9: note = epitope
KEVSSYLKK

SEQ ID NO: 1763 - protein, 7 aa, synthetic construct
  REGION 1..7: note = epitope
LKKVGYN

SEQ ID NO: 1764 - protein, 10 aa, synthetic construct
  REGION 1..10: note = epitope
KEVSSYLKKV

SEQ ID NO: 1765 - protein, 8 aa, synthetic construct
  REGION 1..8: note = epitope
YLKKVGYN

SEQ ID NO: 1766 - protein, 15 aa, synthetic construct
  REGION 1..15: note = epitope
  REGION 1..3: note = misc_feature - Xaa can be any naturally occurring amino acid
  SITE 6: note = misc_feature - Xaa can be any naturally occurring amino acid
  REGION 8..10: note = misc_feature - Xaa can be any naturally occurring amino acid
  REGION 13..15: note = misc_feature - Xaa can be any naturally occurring amino acid
XXXVSXYXXXVGXXX

SEQ ID NO: 1767 - protein, 7 aa, synthetic construct
  REGION 1..7: note = epitope
KKVGYNP

SEQ ID NO: 1768 - protein, 7 aa, synthetic construct
  REGION 1..7: note = epitope
VSSYLKK

SEQ ID NO: 1769 - protein, 6 aa, synthetic construct
  REGION 1..6: note = epitope
KVGYNP

SEQ ID NO: 1770 - protein, 7 aa, synthetic construct
  REGION 1..7: note = epitope
VSSYLKK

SEQ ID NO: 1771 - protein, 6 aa, synthetic construct
  REGION 1..6: note = epitope
KVGYNP

SEQ ID NO: 1772 - protein, 15 aa, synthetic construct
  REGION 1..15: note = epitope
  REGION 1..2: note = misc_feature - Xaa can be any naturally occurring amino acid
  REGION 4..6: note = misc_feature - Xaa can be any naturally occurring amino acid
  REGION 9..10: note = misc_feature - Xaa can be any naturally occurring amino acid
  REGION 12..15: note = misc_feature - Xaa can be any naturally occurring amino acid
XXEXXXYLXXVXXXX

SEQ ID NO: 1773 - protein, 8 aa, synthetic construct
  REGION 1..8: note = epitope
EVSSYLKK

SEQ ID NO: 1774 - protein, 9 aa, synthetic construct
  REGION 1..9: note = epitope
YLKKVGYNP

SEQ ID NO: 1775 - protein, 7 aa, synthetic construct
  REGION 1..7: note = epitope
LKKVGYN

SEQ ID NO: 1776 - protein, 15 aa, synthetic construct
  REGION 1..15: note = epitope
  REGION 1..2: note = misc_feature - Xaa can be any naturally occurring amino acid
  SITE 5: note = misc_feature - Xaa can be any naturally occurring amino acid
  SITE 8: note = misc_feature - Xaa can be any naturally occurring amino acid
  SITE 10: note = misc_feature - Xaa can be any naturally occurring amino acid
  REGION 12..15: note = misc_feature - Xaa can be any naturally occurring amino acid
XXEVXSYXKXVXXXX

SEQ ID NO: 1777 - protein, 9 aa, synthetic construct
  REGION 1..9: note = epitope
KEVSSYLKK

SEQ ID NO: 1778 - protein, 4 aa, synthetic construct
  REGION 1..4: note = epitope
KVGY

SEQ ID NO: 1779 - protein, 15 aa, synthetic construct
  REGION 1..15: note = epitope
  REGION 1..3: note = misc_feature - Xaa can be any naturally occurring amino acid
  REGION 9..10: note = misc_feature - Xaa can be any naturally occurring amino acid
  REGION 12..14: note = misc_feature - Xaa can be any naturally occurring amino acid
XXXVSSYLXXVXXXP

SEQ ID NO: 1780 - protein, 6 aa, synthetic construct
  REGION 1..6: note = epitope
YLKKVG

SEQ ID NO: 1781 - protein, 10 aa, synthetic construct
  REGION 1..10: note = epitope
KEVSSYLKKV

SEQ ID NO: 1782 - protein, 10 aa, synthetic construct
  REGION 1..10: note = epitope
VSSYLKKVGY

SEQ ID NO: 1783 - protein, 6 aa, synthetic construct
  REGION 1..6: note = epitope
KVGYNP

SEQ ID NO: 1784 - protein, 8 aa, synthetic construct
  REGION 1..8: note = epitope
LKKVGYNP

SEQ ID NO: 1785 - protein, 8 aa, synthetic construct
  REGION 1..8: note = epitope
LKKVGYNP

SEQ ID NO: 1786 - protein, 9 aa, synthetic construct
  REGION 1..9: note = epitope
KEVSSYLKK

SEQ ID NO: 1787 - protein, 8 aa, synthetic construct
  REGION 1..8: note = epitope
KEVSSYLK

SEQ ID NO: 1788 - protein, 8 aa, synthetic construct
  REGION 1..8: note = epitope
LKKVGYNP

SEQ ID NO: 1789 - protein, 15 aa, synthetic construct
  REGION 1..15: note = epitope
SGKELEALPKFLKNG

SEQ ID NO: 1790 - protein, 6 aa, synthetic construct
  REGION 1..6: note = epitope
SGKELE

SEQ ID NO: 1791 - protein, 4 aa, synthetic construct
  REGION 1..4: note = epitope
PKFL

SEQ ID NO: 1792 - protein, 6 aa, synthetic construct
  REGION 1..6: note = epitope
SGKELE

SEQ ID NO: 1793 - protein, 10 aa, synthetic construct
  REGION 1..10: note = epitope
SGKELEALPK

SEQ ID NO: 1794 - protein, 15 aa, synthetic construct
  REGION 1..15: note = epitope
  REGION 1..2: note = misc_feature - Xaa can be any naturally occurring amino acid
  SITE 4: note = misc_feature - Xaa can be any naturally occurring amino acid
  REGION 7..8: note = misc_feature - Xaa can be any naturally occurring amino acid
  SITE 10: note = misc_feature - Xaa can be any naturally occurring amino acid
  SITE 15: note = misc_feature - Xaa can be any naturally occurring amino acid
XXKXLEXXPXFLKNX

SEQ ID NO: 1795 - protein, 15 aa, synthetic construct
  REGION 1..15: note = epitope
  REGION 1..5: note = misc_feature - Xaa can be any naturally occurring amino acid
  REGION 7..10: note = misc_feature - Xaa can be any naturally occurring amino acid
  REGION 14..15: note = misc_feature - Xaa can be any naturally occurring amino acid
XXXXXEXXXXFLKXX

SEQ ID NO: 1796 - protein, 10 aa, synthetic construct
  REGION 1..10: note = epitope
SGKELEALPK

SEQ ID NO: 1797 - protein, 10 aa, synthetic construct
  REGION 1..10: note = epitope
  REGION 1..2: note = misc_feature - Xaa can be any naturally occurring amino acid
  SITE 4: note = misc_feature - Xaa can be any naturally occurring amino acid
  REGION 7..8: note = misc_feature - Xaa can be any naturally occurring amino acid
  SITE 10: note = misc_feature - Xaa can be any naturally occurring amino acid
XXKXLEXXPX

SEQ ID NO: 1798 - protein, 9 aa, synthetic construct
  REGION 1..9: note = epitope
EALPKFLKN

SEQ ID NO: 1799 - protein, 4 aa, synthetic construct
  REGION 1..4: note = epitope
KFLK

SEQ ID NO: 1800 - protein, 8 aa, synthetic construct
  REGION 1..8: note = epitope
KELEALPK

SEQ ID NO: 1801 - protein, 10 aa, synthetic construct
  REGION 1..10: note = epitope
LEALPKFLKN

SEQ ID NO: 1802 - protein, 10 aa, synthetic construct
  REGION 1..10: note = epitope
SGKELEALPK

SEQ ID NO: 1803 - protein, 6 aa, synthetic construct
  REGION 1..6: note = epitope
SGKELE

SEQ ID NO: 1804 - protein, 5 aa, synthetic construct
  REGION 1..5: note = epitope
KFLKN

SEQ ID NO: 1805 - protein, 15 aa, synthetic construct
  REGION 1..15: note = epitope
  REGION 1..2: note = misc_feature - Xaa can be any naturally occurring amino acid
  SITE 5: note = misc_feature - Xaa can be any naturally occurring amino acid
  SITE 8: note = misc_feature - Xaa can be any naturally occurring amino acid
  REGION 10..15: note = misc_feature - Xaa can be any naturally occurring amino acid
XXKEXEAXPXXXXXX

SEQ ID NO: 1806 - protein, 7 aa, synthetic construct
  REGION 1..7: note = epitope
ELEALPK

SEQ ID NO: 1807 - protein, 7 aa, synthetic construct
  REGION 1..7: note = epitope
PKFLKNG

SEQ ID NO: 1808 - protein, 15 aa, synthetic construct
  REGION 1..15: note = epitope
  REGION 2..3: note = misc_feature - Xaa can be any naturally occurring amino acid
  SITE 8: note = misc_feature - Xaa can be any naturally occurring amino acid
  SITE 10: note = misc_feature - Xaa can be any naturally occurring amino acid
  REGION 14..15: note = misc_feature - Xaa can be any naturally occurring amino acid
SXXELEAXPXFLKXX

SEQ ID NO: 1809 - protein, 9 aa, synthetic construct
  REGION 1..9: note = epitope
ELEALPKFL

SEQ ID NO: 1810 - protein, 9 aa, synthetic construct
  REGION 1..9: note = epitope
  SITE 5: note = misc_feature - Xaa can be any naturally occurring amino acid
  SITE 7: note = misc_feature - Xaa can be any naturally occurring amino acid
ELEAXPXFL

SEQ ID NO: 1811 - protein, 9 aa, synthetic construct
  REGION 1..9: note = epitope
ALPKFLKNG

SEQ ID NO: 1812 - protein, 9 aa, synthetic construct
  REGION 1..9: note = epitope
  SITE 2: note = misc_feature - Xaa can be any naturally occurring amino acid
  SITE 4: note = misc_feature - Xaa can be any naturally occurring amino acid
  REGION 8..9: note = misc_feature - Xaa can be any naturally occurring amino acid
AXPXFLKXX

SEQ ID NO: 1813 - protein, 15 aa, synthetic construct
  REGION 1..15: note = epitope
  REGION 1..2: note = misc_feature - Xaa can be any naturally occurring amino acid
  SITE 5: note = misc_feature - Xaa can be any naturally occurring amino acid
  REGION 7..8: note = misc_feature - Xaa can be any naturally occurring amino acid
  REGION 10..15: note = misc_feature - Xaa can be any naturally occurring amino acid
XXKEXEXXPXXXXXX

SEQ ID NO: 1814 - protein, 6 aa, synthetic construct
  REGION 1..6: note = epitope
KELEAL

SEQ ID NO: 1815 - protein, 5 aa, synthetic construct
  REGION 1..5: note = epitope
PKFLK

SEQ ID NO: 1816 - protein, 8 aa, synthetic construct
  REGION 1..8: note = epitope
LEALPKFL

SEQ ID NO: 1817 - protein, 6 aa, synthetic construct
  REGION 1..6: note = epitope
SGKELE

SEQ ID NO: 1818 - protein, 4 aa, synthetic construct
  REGION 1..4: note = epitope
PKFL

SEQ ID NO: 1819 - protein, 10 aa, synthetic construct
  REGION 1..10: note = epitope
SGKELEALPK

SEQ ID NO: 1820 - protein, 5 aa, synthetic construct
  REGION 1..5: note = epitope
PKFLK

SEQ ID NO: 1821 - protein, 10 aa, synthetic construct
  REGION 1..10: note = epitope
SGKELEALPK

SEQ ID NO: 1822 - protein, 10 aa, synthetic construct
  REGION 1..10: note = epitope
SGKELEALPK

SEQ ID NO: 1823 - protein, 5 aa, synthetic construct
  REGION 1..5: note = epitope
LPKFL

SEQ ID NO: 1824 - protein, 6 aa, synthetic construct
  REGION 1..6: note = epitope
LPKFLK

SEQ ID NO: 1825 - protein, 4 aa, synthetic construct
  REGION 1..4: note = epitope
LPKF

SEQ ID NO: 1826 - protein, 4 aa, synthetic construct
  REGION 1..4: note = epitope
PKFL

SEQ ID NO: 1827 - protein, 15 aa, synthetic construct
  REGION 1..15: note = epitope
  REGION 1..3: note = misc_feature - Xaa can be any naturally occurring amino acid
  REGION 7..11: note = misc_feature - Xaa can be any naturally occurring amino acid
  REGION 13..15: note = misc_feature - Xaa can be any naturally occurring amino acid
XXXELEXXXXXLXXX

SEQ ID NO: 1828 - protein, 9 aa, synthetic construct
  REGION 1..9: note = epitope
LEALPKFLK

SEQ ID NO: 1829 - protein, 15 aa, synthetic construct
  REGION 1..15: note = epitope
  REGION 1..3: note = misc_feature - Xaa can be any naturally occurring amino acid
  REGION 7..8: note = misc_feature - Xaa can be any naturally occurring amino acid
  REGION 10..11: note = misc_feature - Xaa can be any naturally occurring amino acid
  REGION 13..15: note = misc_feature - Xaa can be any naturally occurring amino acid
XXXELEXXPXXLXXX

SEQ ID NO: 1830 - protein, 5 aa, synthetic construct
  REGION 1..5: note = epitope
LPKFL

SEQ ID NO: 1831 - protein, 15 aa, synthetic construct
  REGION 1..15: note = epitope
  REGION 1..2: note = misc_feature - Xaa can be any naturally occurring amino acid
  SITE 4: note = misc_feature - Xaa can be any naturally occurring amino acid
  REGION 7..8: note = misc_feature - Xaa can be any naturally occurring amino acid
  REGION 10..15: note = misc_feature - Xaa can be any naturally occurring amino acid
XXKXLEXXPXXXXXX

SEQ ID NO: 1832 - protein, 4 aa, synthetic construct
  REGION 1..4: note = epitope
KELE

SEQ ID NO: 1833 - protein, 5 aa, synthetic construct
  REGION 1..5: note = epitope
KFLKN

SEQ ID NO: 1834 - protein, 15 aa, synthetic construct
  REGION 1..15: note = epitope
  REGION 1..2: note = misc_feature - Xaa can be any naturally occurring amino acid
  REGION 6..8: note = misc_feature - Xaa can be any naturally occurring amino acid
  SITE 15: note = misc_feature - Xaa can be any naturally occurring amino acid
XXKELXXXPKFLKNX

SEQ ID NO: 1835 - protein, 4 aa, synthetic construct
  REGION 1..4: note = epitope
KFLK

SEQ ID NO: 1836 - protein, 15 aa, synthetic construct
  REGION 1..15: note = epitope
VIAEYTVRTLQRTVP

SEQ ID NO: 1837 - protein, 7 aa, synthetic construct
  REGION 1..7: note = epitope
VRTLQRT

SEQ ID NO: 1838 - protein, 4 aa, synthetic construct
  REGION 1..4: note = epitope
RTLQ

SEQ ID NO: 1839 - protein, 7 aa, synthetic construct
  REGION 1..7: note = epitope
TVRTLQR

SEQ ID NO: 1840 - protein, 4 aa, synthetic construct
  REGION 1..4: note = epitope
RTLQ

SEQ ID NO: 1841 - protein, 7 aa, synthetic construct
  REGION 1..7: note = epitope
YTVRTLQ

SEQ ID NO: 1842 - protein, 6 aa, synthetic construct
  REGION 1..6: note = epitope
TVRTLQ

SEQ ID NO: 1843 - protein, 7 aa, synthetic construct
  REGION 1..7: note = epitope
TVRTLQR

SEQ ID NO: 1844 - protein, 6 aa, synthetic construct
  REGION 1..6: note = epitope
TVRTLQ

SEQ ID NO: 1845 - protein, 8 aa, synthetic construct
  REGION 1..8: note = epitope
YTVRTLQR

SEQ ID NO: 1846 - protein, 7 aa, synthetic construct
  REGION 1..7: note = epitope
TVRTLQR

SEQ ID NO: 1847 - protein, 15 aa, synthetic construct
  REGION 1..15: note = epitope
  REGION 1..4: note = misc_feature - Xaa can be any naturally occurring amino acid
  SITE 6: note = misc_feature - Xaa can be any naturally occurring amino acid
  REGION 8..10: note = misc_feature - Xaa can be any naturally occurring amino acid
  REGION 13..15: note = misc_feature - Xaa can be any naturally occurring amino acid
XXXXYXVXXXQRXXX

SEQ ID NO: 1848 - protein, 9 aa, synthetic construct
  REGION 1..9: note = epitope
YTVRTLQRT

SEQ ID NO: 1849 - protein, 7 aa, synthetic construct
  REGION 1..7: note = epitope
TVRTLQR

SEQ ID NO: 1850 - protein, 5 aa, synthetic construct
  REGION 1..5: note = epitope
VRTLQ

SEQ ID NO: 1851 - protein, 15 aa, synthetic construct
  REGION 1..15: note = epitope
  REGION 1..4: note = misc_feature - Xaa can be any naturally occurring amino acid
  REGION 8..11: note = misc_feature - Xaa can be any naturally occurring amino acid
  REGION 13..15: note = misc_feature - Xaa can be any naturally occurring amino acid
XXXXYTVXXXXRXXX

SEQ ID NO: 1852 - protein, 9 aa, synthetic construct
  REGION 1..9: note = epitope
YTVRTLQRT

SEQ ID NO: 1853 - protein, 7 aa, synthetic construct
  REGION 1..7: note = epitope
TVRTLQR

SEQ ID NO: 1854 - protein, 5 aa, synthetic construct
  REGION 1..5: note = epitope
RTLQR

SEQ ID NO: 1855 - protein, 15 aa, synthetic construct
  REGION 1..15: note = epitope
  REGION 1..4: note = misc_feature - Xaa can be any naturally occurring amino acid
  REGION 8..10: note = misc_feature - Xaa can be any naturally occurring amino acid
  REGION 13..14: note = misc_feature - Xaa can be any naturally occurring amino acid
XXXXYTVXXXQRXXP

SEQ ID NO: 1856 - protein, 9 aa, synthetic construct
  REGION 1..9: note = epitope
YTVRTLQRT

SEQ ID NO: 1857 - protein, 7 aa, synthetic construct
  REGION 1..7: note = epitope
TVRTLQR

SEQ ID NO: 1858 - protein, 4 aa, synthetic construct
  REGION 1..4: note = epitope
RTLQ

SEQ ID NO: 1859 - protein, 8 aa, synthetic construct
  REGION 1..8: note = epitope
YTVRTLQR

SEQ ID NO: 1860 - protein, 6 aa, synthetic construct
  REGION 1..6: note = epitope
TVRTLQ

SEQ ID NO: 1861 - protein, 8 aa, synthetic construct
  REGION 1..8: note = epitope
TVRTLQRT

SEQ ID NO: 1862 - protein, 5 aa, synthetic construct
  REGION 1..5: note = epitope
VRTLQ

SEQ ID NO: 1863 - protein, 10 aa, synthetic construct
  REGION 1..10: note = epitope
VIAEYTVRTL

SEQ ID NO: 1864 - protein, 7 aa, synthetic construct
  REGION 1..7: note = epitope
TVRTLQR

SEQ ID NO: 1865 - protein, 7 aa, synthetic construct
  REGION 1..7: note = epitope
TVRTLQR

SEQ ID NO: 1866 - protein, 7 aa, synthetic construct
  REGION 1..7: note = epitope
TVRTLQR

SEQ ID NO: 1867 - protein, 7 aa, synthetic construct
  REGION 1..7: note = epitope
TVRTLQR

SEQ ID NO: 1868 - protein, 6 aa, synthetic construct
  REGION 1..6: note = epitope
TVRTLQ

SEQ ID NO: 1869 - protein, 9 aa, synthetic construct
  REGION 1..9: note = epitope
YTVRTLQRT

SEQ ID NO: 1870 - protein, 8 aa, synthetic construct
  REGION 1..8: note = epitope
YTVRTLQR

SEQ ID NO: 1871 - protein, 6 aa, synthetic construct
  REGION 1..6: note = epitope
VRTLQR

SEQ ID NO: 1872 - protein, 9 aa, synthetic construct
  REGION 1..9: note = epitope
YTVRTLQRT

SEQ ID NO: 1873 - protein, 7 aa, synthetic construct
  REGION 1..7: note = epitope
TVRTLQR

SEQ ID NO: 1874 - protein, 15 aa, synthetic construct
  REGION 1..15: note = epitope
  REGION 1..4: note = misc_feature - Xaa can be any naturally occurring amino acid
  REGION 8..9: note = misc_feature - Xaa can be any naturally occurring amino acid
  SITE 11: note = misc_feature - Xaa can be any naturally occurring amino acid
  REGION 13..15: note = misc_feature - Xaa can be any naturally occurring amino acid
XXXXYTVXXLXRXXX

SEQ ID NO: 1875 - protein, 9 aa, synthetic construct
  REGION 1..9: note = epitope
TVRTLQRTV

SEQ ID NO: 1876 - protein, 7 aa, synthetic construct
  REGION 1..7: note = epitope
VRTLQRT

SEQ ID NO: 1877 - protein, 4 aa, synthetic construct
  REGION 1..4: note = epitope
TLQR

SEQ ID NO: 1878 - protein, 8 aa, synthetic construct
  REGION 1..8: note = epitope
TVRTLQRT

SEQ ID NO: 1879 - protein, 6 aa, synthetic construct
  REGION 1..6: note = epitope
TVRTLQ

SEQ ID NO: 1880 - protein, 8 aa, synthetic construct
  REGION 1..8: note = epitope
TVRTLQRT

SEQ ID NO: 1881 - protein, 7 aa, synthetic construct
  REGION 1..7: note = epitope
TVRTLQR

SEQ ID NO: 1882 - protein, 8 aa, synthetic construct
  REGION 1..8: note = epitope
TVRTLQRT

SEQ ID NO: 1883 - protein, 5 aa, synthetic construct
  REGION 1..5: note = epitope
VRTLQ

SEQ ID NO: 1884 - protein, 8 aa, synthetic construct
  REGION 1..8: note = epitope
TVRTLQRT

SEQ ID NO: 1885 - protein, 4 aa, synthetic construct
  REGION 1..4: note = epitope
RTLQ

SEQ ID NO: 1886 - protein, 8 aa, synthetic construct
  REGION 1..8: note = epitope
TVRTLQRT

SEQ ID NO: 1887 - protein, 10 aa, synthetic construct
  REGION 1..10: note = epitope
YTVRTLQRTV

SEQ ID NO: 1888 - protein, 8 aa, synthetic construct
  REGION 1..8: note = epitope
TVRTLQRT

SEQ ID NO: 1889 - protein, 7 aa, synthetic construct
  REGION 1..7: note = epitope
TVRTLQR

SEQ ID NO: 1890 - protein, 4 aa, synthetic construct
  REGION 1..4: note = epitope
RTLQ

SEQ ID NO: 1891 - protein, 6 aa, synthetic construct
  REGION 1..6: note = epitope
YTVRTL

SEQ ID NO: 1892 - protein, 15 aa, synthetic construct
  REGION 1..15: note = epitope
  REGION 1..4: note = misc_feature - Xaa can be any naturally occurring amino acid
  REGION 8..9: note = misc_feature - Xaa can be any naturally occurring amino acid
  SITE 14: note = misc_feature - Xaa can be any naturally occurring amino acid
XXXXYTVXXLQRTXP

SEQ ID NO: 1893 - protein, 9 aa, synthetic construct
  REGION 1..9: note = epitope
YTVRTLQRT

SEQ ID NO: 1894 - protein, 5 aa, synthetic construct
  REGION 1..5: note = epitope
VRTLQ

SEQ ID NO: 1895 - protein, 15 aa, synthetic construct
  REGION 1..15: note = epitope
QVPLVQQQQFPGQQQ

SEQ ID NO: 1896 - protein, 7 aa, synthetic construct
  REGION 1..7: note = epitope
VPLVQQQ

SEQ ID NO: 1897 - protein, 6 aa, synthetic construct
  REGION 1..6: note = epitope
VPLVQQ

SEQ ID NO: 1898 - protein, 8 aa, synthetic construct
  REGION 1..8: note = epitope
QQFPGQQQ

SEQ ID NO: 1899 - protein, 15 aa, synthetic construct
  REGION 1..15: note = epitope
  REGION 2..3: note = misc_feature - Xaa can be any naturally occurring amino acid
  REGION 8..15: note = misc_feature - Xaa can be any naturally occurring amino acid
QXXLVQQXXXXXXXX

SEQ ID NO: 1900 - protein, 7 aa, synthetic construct
  REGION 1..7: note = epitope
QVPLVQQ

SEQ ID NO: 1901 - protein, 5 aa, synthetic construct
  REGION 1..5: note = epitope
VPLVQ

SEQ ID NO: 1902 - protein, 7 aa, synthetic construct
  REGION 1..7: note = epitope
QQFPGQQ

SEQ ID NO: 1903 - protein, 15 aa, synthetic construct
  REGION 1..15: note = epitope
  REGION 3..5: note = misc_feature - Xaa can be any naturally occurring amino acid
  REGION 8..15: note = misc_feature - Xaa can be any naturally occurring amino acid
QVXXXQQXXXXXXXX

SEQ ID NO: 1904 - protein, 7 aa, synthetic construct
  REGION 1..7: note = epitope
QVPLVQQ

SEQ ID NO: 1905 - protein, 5 aa, synthetic construct
  REGION 1..5: note = epitope
VPLVQ

SEQ ID NO: 1906 - protein, 7 aa, synthetic construct
  REGION 1..7: note = epitope
QFPGQQQ

SEQ ID NO: 1907 - protein, 15 aa, synthetic construct
  REGION 1..15: note = epitope
  REGION 3..5: note = misc_feature - Xaa can be any naturally occurring amino acid
  REGION 8..15: note = misc_feature - Xaa can be any naturally occurring amino acid
QVXXXQQXXXXXXXX

SEQ ID NO: 1908 - protein, 7 aa, synthetic construct
  REGION 1..7: note = epitope
QVPLVQQ

SEQ ID NO: 1909 - protein, 5 aa, synthetic construct
  REGION 1..5: note = epitope
VPLVQ

SEQ ID NO: 1910 - protein, 7 aa, synthetic construct
  REGION 1..7: note = epitope
QFPGQQQ

SEQ ID NO: 1911 - protein, 15 aa, synthetic construct
  REGION 1..15: note = epitope
  REGION 2..3: note = misc_feature - Xaa can be any naturally occurring amino acid
  REGION 8..15: note = misc_feature - Xaa can be any naturally occurring amino acid
QXXLVQQXXXXXXXX

SEQ ID NO: 1912 - protein, 8 aa, synthetic construct
  REGION 1..8: note = epitope
QVPLVQQQ

SEQ ID NO: 1913 - protein, 7 aa, synthetic construct
  REGION 1..7: note = epitope
QVPLVQQ

SEQ ID NO: 1914 - protein, 7 aa, synthetic construct
  REGION 1..7: note = epitope
QQFPGQQ

SEQ ID NO: 1915 - protein, 9 aa, synthetic construct
  REGION 1..9: note = epitope
QVPLVQQQQ

SEQ ID NO: 1916 - protein, 10 aa, synthetic construct
  REGION 1..10: note = epitope
QQQQFPGQQQ

SEQ ID NO: 1917 - protein, 15 aa, synthetic construct
  REGION 1..15: note = epitope
  REGION 2..4: note = misc_feature - Xaa can be any naturally occurring amino acid
  REGION 8..13: note = misc_feature - Xaa can be any naturally occurring amino acid
QXXXVQQXXXXXXQQ

SEQ ID NO: 1918 - protein, 9 aa, synthetic construct
  REGION 1..9: note = epitope
QVPLVQQQQ

SEQ ID NO: 1919 - protein, 7 aa, synthetic construct
  REGION 1..7: note = epitope
VPLVQQQ

SEQ ID NO: 1920 - protein, 10 aa, synthetic construct
  REGION 1..10: note = epitope
LVQQQQFPGQ

SEQ ID NO: 1921 - protein, 8 aa, synthetic construct
  REGION 1..8: note = epitope
QVPLVQQQ

SEQ ID NO: 1922 - protein, 7 aa, synthetic construct
  REGION 1..7: note = epitope
QVPLVQQ

SEQ ID NO: 1923 - protein, 8 aa, synthetic construct
  REGION 1..8: note = epitope
QQFPGQQQ

SEQ ID NO: 1924 - protein, 5 aa, synthetic construct
  REGION 1..5: note = epitope
FPGQQ

SEQ ID NO: 1925 - protein, 6 aa, synthetic construct
  REGION 1..6: note = epitope
QFPGQQ

SEQ ID NO: 1926 - protein, 9 aa, synthetic construct
  REGION 1..9: note = epitope
QQQFPGQQQ

SEQ ID NO: 1927 - protein, 6 aa, synthetic construct
  REGION 1..6: note = epitope
QFPGQQ

SEQ ID NO: 1928 - protein, 7 aa, synthetic construct
  REGION 1..7: note = epitope
VPLVQQQ

SEQ ID NO: 1929 - protein, 7 aa, synthetic construct
  REGION 1..7: note = epitope
QFPGQQQ

SEQ ID NO: 1930 - protein, 6 aa, synthetic construct
  REGION 1..6: note = epitope
FPGQQQ

SEQ ID NO: 1931 - protein, 15 aa, synthetic construct
  REGION 1..15: note = epitope
  REGION 2..4: note = misc_feature - Xaa can be any naturally occurring amino acid
  REGION 8..14: note = misc_feature - Xaa can be any naturally occurring amino acid
QXXXVQQXXXXXXXQ

SEQ ID NO: 1932 - protein, 8 aa, synthetic construct
  REGION 1..8: note = epitope
QVPLVQQQ

SEQ ID NO: 1933 - protein, 6 aa, synthetic construct
  REGION 1..6: note = epitope
VPLVQQ

SEQ ID NO: 1934 - protein, 15 aa, synthetic construct
  REGION 1..15: note = epitope
  REGION 1..4: note = misc_feature - Xaa can be any naturally occurring amino acid
  REGION 10..12: note = misc_feature - Xaa can be any naturally occurring amino acid
XXXXVQQQQXXXQQQ

SEQ ID NO: 1935 - protein, 15 aa, synthetic construct
  REGION 1..15: note = epitope
  REGION 1..5: note = misc_feature - Xaa can be any naturally occurring amino acid
  REGION 8..13: note = misc_feature - Xaa can be any naturally occurring amino acid
XXXXXQQXXXXXXQQ

SEQ ID NO: 1936 - protein, 7 aa, synthetic construct
  REGION 1..7: note = epitope
QVPLVQQ

SEQ ID NO: 1937 - protein, 8 aa, synthetic construct
  REGION 1..8: note = epitope
QQFPGQQQ

SEQ ID NO: 1938 - protein, 6 aa, synthetic construct
  REGION 1..6: note = epitope
QFPGQQ

SEQ ID NO: 1939 - protein, 7 aa, synthetic construct
  REGION 1..7: note = epitope
QVPLVQQ

SEQ ID NO: 1940 - protein, 5 aa, synthetic construct
  REGION 1..5: note = epitope
VPLVQ

SEQ ID NO: 1941 - protein, 8 aa, synthetic construct
  REGION 1..8: note = epitope
QQFPGQQQ

SEQ ID NO: 1942 - protein, 7 aa, synthetic construct
  REGION 1..7: note = epitope
QQFPGQQ

SEQ ID NO: 1943 - protein, 6 aa, synthetic construct
  REGION 1..6: note = epitope
QFPGQQ

SEQ ID NO: 1944 - protein, 7 aa, synthetic construct
  REGION 1..7: note = epitope
QFPGQQQ

SEQ ID NO: 1945 - protein, 5 aa, synthetic construct
  REGION 1..5: note = epitope
FPGQQ

SEQ ID NO: 1946 - protein, 4 aa, synthetic construct
  REGION 1..4: note = epitope
FPGQ

SEQ ID NO: 1947 - protein, 15 aa, synthetic construct
  REGION 1..15: note = epitope
  REGION 1..5: note = misc_feature - Xaa can be any naturally occurring amino acid
  REGION 8..12: note = misc_feature - Xaa can be any naturally occurring amino acid
XXXXXQQXXXXXQQQ

SEQ ID NO: 1948 - protein, 8 aa, synthetic construct
  REGION 1..8: note = epitope
QVPLVQQQ

SEQ ID NO: 1949 - protein, 6 aa, synthetic construct
  REGION 1..6: note = epitope
VPLVQQ

SEQ ID NO: 1950 - protein, 9 aa, synthetic construct
  REGION 1..9: note = epitope
QQQFPGQQQ

SEQ ID NO: 1951 - protein, 7 aa, synthetic construct
  REGION 1..7: note = epitope
QFPGQQQ

SEQ ID NO: 1952 - protein, 6 aa, synthetic construct
  REGION 1..6: note = epitope
QFPGQQ

SEQ ID NO: 1953 - protein, 15 aa, synthetic construct
  REGION 1..15: note = epitope
  REGION 1..7: note = misc_feature - Xaa can be any naturally occurring amino acid
  REGION 9..10: note = misc_feature - Xaa can be any naturally occurring amino acid
  SITE 15: note = misc_feature - Xaa can be any naturally occurring amino acid
XXXXXXXQXXPGQQX

SEQ ID NO: 1954 - protein, 7 aa, synthetic construct
  REGION 1..7: note = epitope
QQFPGQQ

SEQ ID NO: 1955 - protein, 5 aa, synthetic construct
  REGION 1..5: note = epitope
QFPGQ

SEQ ID NO: 1956 - protein, 15 aa, synthetic construct
  REGION 1..15: note = epitope
  REGION 1..7: note = misc_feature - Xaa can be any naturally occurring amino acid
  REGION 9..10: note = misc_feature - Xaa can be any naturally occurring amino acid
XXXXXXXQXXPGQQQ

SEQ ID NO: 1957 - protein, 15 aa, synthetic construct
  REGION 1..15: note = epitope
  REGION 1..10: note = misc_feature - Xaa can be any naturally occurring amino acid
XXXXXXXXXXPGQQQ

SEQ ID NO: 1958 - protein, 8 aa, synthetic construct
  REGION 1..8: note = epitope
QQFPGQQQ

SEQ ID NO: 1959 - protein, 6 aa, synthetic construct
  REGION 1..6: note = epitope
QFPGQQ

SEQ ID NO: 1960 - protein, 6 aa, synthetic construct
  REGION 1..6: note = epitope
  REGION 1..2: note = misc_feature - Xaa can be any naturally occurring amino acid
XXPGQQ

SEQ ID NO: 1961 - protein, 9 aa, synthetic construct
  REGION 1..9: note = epitope
QQQQFPGQQ

SEQ ID NO: 1962 - protein, 8 aa, synthetic construct
  REGION 1..8: note = epitope
QQQFPGQQ

SEQ ID NO: 1963 - protein, 15 aa, synthetic construct
  REGION 1..15: note = epitope
  REGION 1..5: note = misc_feature - Xaa can be any naturally occurring amino acid
  SITE 7: note = misc_feature - Xaa can be any naturally occurring amino acid
  REGION 10..12: note = misc_feature - Xaa can be any naturally occurring amino acid
XXXXXQXQQXXXQQQ

SEQ ID NO: 1964 - protein, 8 aa, synthetic construct
  REGION 1..8: note = epitope
QQQFPGQQ

SEQ ID NO: 1965 - protein, 7 aa, synthetic construct
  REGION 1..7: note = epitope
QQFPGQQ

SEQ ID NO: 1966 - protein, 6 aa, synthetic construct
  REGION 1..6: note = epitope
QFPGQQ

SEQ ID NO: 1967 - protein, 7 aa, synthetic construct
  REGION 1..7: note = epitope
VPLVQQQ

SEQ ID NO: 1968 - protein, 6 aa, synthetic construct
  REGION 1..6: note = epitope
QFPGQQ

SEQ ID NO: 1969 - protein, 15 aa, synthetic construct
  REGION 1..15: note = epitope
  SITE 3: note = misc_feature - Xaa can be any naturally occurring amino acid
  REGION 8..10: note = misc_feature - Xaa can be any naturally occurring amino acid
QVXLVQQXXXPGQQQ

SEQ ID NO: 1970 - protein, 15 aa, synthetic construct
  REGION 1..15: note = epitope
  REGION 2..3: note = misc_feature - Xaa can be any naturally occurring amino acid
  REGION 8..14: note = misc_feature - Xaa can be any naturally occurring amino acid
QXXLVQQXXXXXXXQ

SEQ ID NO: 1971 - protein, 15 aa, synthetic construct
  REGION 1..15: note = epitope
  REGION 1..3: note = misc_feature - Xaa can be any naturally occurring amino acid
  REGION 8..15: note = misc_feature - Xaa can be any naturally occurring amino acid
XXXLVQQXXXXXXXX

SEQ ID NO: 1972 - protein, 9 aa, synthetic construct
  REGION 1..9: note = epitope
QVPLVQQQQ

SEQ ID NO: 1973 - protein, 8 aa, synthetic construct
  REGION 1..8: note = epitope
QVPLVQQQ

SEQ ID NO: 1974 - protein, 6 aa, synthetic construct
  REGION 1..6: note = epitope
VPLVQQ

SEQ ID NO: 1975 - protein, 8 aa, synthetic construct
  REGION 1..8: note = epitope
LVQQQQFP

SEQ ID NO: 1976 - protein, 15 aa, synthetic construct
  REGION 1..15: note = epitope
  REGION 1..9: note = misc_feature - Xaa can be any naturally occurring amino acid
  REGION 14..15: note = misc_feature - Xaa can be any naturally occurring amino acid
XXXXXXXXXFPGQXX

SEQ ID NO: 1977 - protein, 15 aa, synthetic construct
  REGION 1..15: note = epitope
DPTGAKVTKAAIKKK

SEQ ID NO: 1978 - protein, 8 aa, synthetic construct
  REGION 1..8: note = epitope
PTGAKVTK

SEQ ID NO: 1979 - protein, 4 aa, synthetic construct
  REGION 1..4: note = epitope
TGAK

SEQ ID NO: 1980 - protein, 5 aa, synthetic construct
  REGION 1..5: note = epitope
AAIKK

SEQ ID NO: 1981 - protein, 6 aa, synthetic construct
  REGION 1..6: note = epitope
DPTGAK

SEQ ID NO: 1982 - protein, 5 aa, synthetic construct
  REGION 1..5: note = epitope
PTGAK

SEQ ID NO: 1983 - protein, 10 aa, synthetic construct
  REGION 1..10: note = epitope
GAKVTKAAIK

SEQ ID NO: 1984 - protein, 15 aa, synthetic construct
  REGION 1..15: note = epitope
  SITE 3: note = misc_feature - Xaa can be any naturally occurring amino acid
  SITE 5: note = misc_feature - Xaa can be any naturally occurring amino acid
  REGION 7..15: note = misc_feature - Xaa can be any naturally occurring amino acid
DPXGXKXXXXXXXXX

SEQ ID NO: 1985 - protein, 8 aa, synthetic construct
  REGION 1..8: note = epitope
PTGAKVTK

SEQ ID NO: 1986 - protein, 4 aa, synthetic construct
  REGION 1..4: note = epitope
AAIK

SEQ ID NO: 1987 - protein, 6 aa, synthetic construct
  REGION 1..6: note = epitope
KAAIKK

SEQ ID NO: 1988 - protein, 4 aa, synthetic construct
  REGION 1..4: note = epitope
AAIK

SEQ ID NO: 1989 - protein, 15 aa, synthetic construct
  REGION 1..15: note = epitope
  REGION 1..8: note = misc_feature - Xaa can be any naturally occurring amino acid
  REGION 14..15: note = misc_feature - Xaa can be any naturally occurring amino acid
XXXXXXXXKAAIKXX

SEQ ID NO: 1990 - protein, 15 aa, synthetic construct
  REGION 1..15: note = epitope
  SITE 1: note = misc_feature - Xaa can be any naturally occurring amino acid
  SITE 3: note = misc_feature - Xaa can be any naturally occurring amino acid
  REGION 14..15: note = misc_feature - Xaa can be any naturally occurring amino acid
XPXGAKVTKAAIKXX

SEQ ID NO: 1991 - protein, 15 aa, synthetic construct
  REGION 1..15: note = epitope
  REGION 1..6: note = misc_feature - Xaa can be any naturally occurring amino acid
  SITE 8: note = misc_feature - Xaa can be any naturally occurring amino acid
  REGION 14..15: note = misc_feature - Xaa can be any naturally occurring amino acid
XXXXXXVXKAAIKXX

SEQ ID NO: 1992 - protein, 4 aa, synthetic construct
  REGION 1..4: note = epitope
TGAK

SEQ ID NO: 1993 - protein, 15 aa, synthetic construct
  REGION 1..15: note = epitope
  REGION 1..4: note = misc_feature - Xaa can be any naturally occurring amino acid
  REGION 6..7: note = misc_feature - Xaa can be any naturally occurring amino acid
  REGION 14..15: note = misc_feature - Xaa can be any naturally occurring amino acid
XXXXAXXTKAAIKXX

SEQ ID NO: 1994 - protein, 15 aa, synthetic construct
  REGION 1..15: note = epitope
  REGION 1..6: note = misc_feature - Xaa can be any naturally occurring amino acid
  SITE 9: note = misc_feature - Xaa can be any naturally occurring amino acid
  REGION 12..15: note = misc_feature - Xaa can be any naturally occurring amino acid
XXXXXXVTXAAXXXX

SEQ ID NO: 1995 - protein, 9 aa, synthetic construct
  REGION 1..9: note = epitope
DPTGAKVTK

SEQ ID NO: 1996 - protein, 5 aa, synthetic construct
  REGION 1..5: note = epitope
VTKAA

SEQ ID NO: 1997 - protein, 15 aa, synthetic construct
  REGION 1..15: note = epitope
  REGION 1..4: note = misc_feature - Xaa can be any naturally occurring amino acid
  REGION 8..10: note = misc_feature - Xaa can be any naturally occurring amino acid
  REGION 12..15: note = misc_feature - Xaa can be any naturally occurring amino acid
XXXXAKVXXXAXXXX

SEQ ID NO: 1998 - protein, 4 aa, synthetic construct
  REGION 1..4: note = epitope
KVTK

SEQ ID NO: 1999 - protein, 15 aa, synthetic construct
  REGION 1..15: note = epitope
  REGION 13..15: note = misc_feature - Xaa can be any naturally occurring amino acid
DPTGAKVTKAAIXXX

SEQ ID NO: 2000 - protein, 15 aa, synthetic construct
  REGION 1..15: note = epitope
  REGION 1..5: note = misc_feature - Xaa can be any naturally occurring amino acid
  SITE 9: note = misc_feature - Xaa can be any naturally occurring amino acid
  REGION 13..15: note = misc_feature - Xaa can be any naturally occurring amino acid
XXXXXKVTXAAIXXX

SEQ ID NO: 2001 - protein, 6 aa, synthetic construct
  REGION 1..6: note = epitope
GAKVTK

SEQ ID NO: 2002 - protein, 15 aa, synthetic construct
  REGION 1..15: note = epitope
  REGION 1..4: note = misc_feature - Xaa can be any naturally occurring amino acid
  REGION 12..15: note = misc_feature - Xaa can be any naturally occurring amino acid
XXXXAKVTKAAXXXX

SEQ ID NO: 2003 - protein, 15 aa, synthetic construct
  REGION 1..15: note = epitope
  REGION 1..5: note = misc_feature - Xaa can be any naturally occurring amino acid
  REGION 9..10: note = misc_feature - Xaa can be any naturally occurring amino acid
  REGION 12..15: note = misc_feature - Xaa can be any naturally occurring amino acid
XXXXXKVTXXAXXXX

SEQ ID NO: 2004 - protein, 15 aa, synthetic construct
  REGION 1..15: note = epitope
STGTIGKRFASINVE

SEQ ID NO: 2005 - protein, 15 aa, synthetic construct
  REGION 1..15: note = epitope
  REGION 1..5: note = misc_feature - Xaa can be any naturally occurring amino acid
  SITE 7: note = misc_feature - Xaa can be any naturally occurring amino acid
  SITE 9: note = misc_feature - Xaa can be any naturally occurring amino acid
  REGION 12..15: note = misc_feature - Xaa can be any naturally occurring amino acid
XXXXXGXRXASXXXX

SEQ ID NO: 2006 - protein, 5 aa, synthetic construct
  REGION 1..5: note = epitope
ASINV

SEQ ID NO: 2007 - protein, 15 aa, synthetic construct
  REGION 1..15: note = epitope
  SITE 1: note = misc_feature - Xaa can be any naturally occurring amino acid
  SITE 3: note = misc_feature - Xaa can be any naturally occurring amino acid
  SITE 7: note = misc_feature - Xaa can be any naturally occurring amino acid
  REGION 9..15: note = misc_feature - Xaa can be any naturally occurring amino acid
XTXTIGXRXXXXXXX

SEQ ID NO: 2008 - protein, 6 aa, synthetic construct
  REGION 1..6: note = epitope
KRFASI

SEQ ID NO: 2009 - protein, 4 aa, synthetic construct
  REGION 1..4: note = epitope
KRFA

SEQ ID NO: 2010 - protein, 4 aa, synthetic construct
  REGION 1..4: note = epitope
KRFA

SEQ ID NO: 2011 - protein, 4 aa, synthetic construct
  REGION 1..4: note = epitope
KRFA

SEQ ID NO: 2012 - protein, 15 aa, synthetic construct
  REGION 1..15: note = epitope
  REGION 1..2: note = misc_feature - Xaa can be any naturally occurring amino acid
  SITE 7: note = misc_feature - Xaa can be any naturally occurring amino acid
  REGION 9..12: note = misc_feature - Xaa can be any naturally occurring amino acid
  REGION 14..15: note = misc_feature - Xaa can be any naturally occurring amino acid
XXGTIGXRXXXXNXX

SEQ ID NO: 2013 - protein, 15 aa, synthetic construct
  REGION 1..15: note = epitope
  REGION 1..2: note = misc_feature - Xaa can be any naturally occurring amino acid
  SITE 7: note = misc_feature - Xaa can be any naturally occurring amino acid
  REGION 9..15: note = misc_feature - Xaa can be any naturally occurring amino acid
XXGTIGXRXXXXXXX

SEQ ID NO: 2014 - protein, 4 aa, synthetic construct
  REGION 1..4: note = epitope
KRFA

SEQ ID NO: 2015 - protein, 5 aa, synthetic construct
  REGION 1..5: note = epitope
KRFAS

SEQ ID NO: 2016 - protein, 15 aa, synthetic construct
  REGION 1..15: note = epitope
  REGION 1..3: note = misc_feature - Xaa can be any naturally occurring amino acid
  SITE 7: note = misc_feature - Xaa can be any naturally occurring amino acid
  REGION 9..15: note = misc_feature - Xaa can be any naturally occurring amino acid
XXXTIGXRXXXXXXX

SEQ ID NO: 2017 - protein, 8 aa, synthetic construct
  REGION 1..8: note = epitope
TGTIGKRF

SEQ ID NO: 2018 - protein, 7 aa, synthetic construct
  REGION 1..7: note = epitope
KRFASIN

SEQ ID NO: 2019 - protein, 7 aa, synthetic construct
  REGION 1..7: note = epitope
KRFASIN

SEQ ID NO: 2020 - protein, 10 aa, synthetic construct
  REGION 1..10: note = epitope
STGTIGKRFA

SEQ ID NO: 2021 - protein, 8 aa, synthetic construct
  REGION 1..8: note = epitope
GKRFASIN

SEQ ID NO: 2022 - protein, 6 aa, synthetic construct
  REGION 1..6: note = epitope
RFASIN

SEQ ID NO: 2023 - protein, 7 aa, synthetic construct
  REGION 1..7: note = epitope
KRFASIN

SEQ ID NO: 2024 - protein, 4 aa, synthetic construct
  REGION 1..4: note = epitope
KRFA

SEQ ID NO: 2025 - protein, 5 aa, synthetic construct
  REGION 1..5: note = epitope
TGTIG

SEQ ID NO: 2026 - protein, 7 aa, synthetic construct
  REGION 1..7: note = epitope
KRFASIN

SEQ ID NO: 2027 - protein, 15 aa, synthetic construct
  REGION 1..15: note = epitope
TPGALQYLSGVILFE

SEQ ID NO: 2028 - protein, 10 aa, synthetic construct
  REGION 1..10: note = epitope
PGALQYLSGV

SEQ ID NO: 2029 - protein, 8 aa, synthetic construct
  REGION 1..8: note = epitope
YLSGVILF

SEQ ID NO: 2030 - protein, 5 aa, synthetic construct
  REGION 1..5: note = epitope
GVILF

SEQ ID NO: 2031 - protein, 5 aa, synthetic construct
  REGION 1..5: note = epitope
YLSGV

SEQ ID NO: 2032 - protein, 8 aa, synthetic construct
  REGION 1..8: note = epitope
YLSGVILF

SEQ ID NO: 2033 - protein, 5 aa, synthetic construct
  REGION 1..5: note = epitope
YLSGV

SEQ ID NO: 2034 - protein, 8 aa, synthetic construct
  REGION 1..8: note = epitope
PGALQYLS

SEQ ID NO: 2035 - protein, 8 aa, synthetic construct
  REGION 1..8: note = epitope
YLSGVILF

SEQ ID NO: 2036 - protein, 5 aa, synthetic construct
  REGION 1..5: note = epitope
GVILF

SEQ ID NO: 2037 - protein, 10 aa, synthetic construct
  REGION 1..10: note = epitope
PGALQYLSGV

SEQ ID NO: 2038 - protein, 8 aa, synthetic construct
  REGION 1..8: note = epitope
YLSGVILF

SEQ ID NO: 2039 - protein, 6 aa, synthetic construct
  REGION 1..6: note = epitope
LSGVIL

SEQ ID NO: 2040 - protein, 8 aa, synthetic construct
  REGION 1..8: note = epitope
YLSGVILF

SEQ ID NO: 2041 - protein, 10 aa, synthetic construct
  REGION 1..10: note = epitope
PGALQYLSGV

SEQ ID NO: 2042 - protein, 8 aa, synthetic construct
  REGION 1..8: note = epitope
YLSGVILF

SEQ ID NO: 2043 - protein, 15 aa, synthetic construct
  REGION 1..15: note = epitope
  SITE 1: note = misc_feature - Xaa can be any naturally occurring amino acid
  REGION 3..5: note = misc_feature - Xaa can be any naturally occurring amino acid
  SITE 8: note = misc_feature - Xaa can be any naturally occurring amino acid
  REGION 10..13: note = misc_feature - Xaa can be any naturally occurring amino acid
  SITE 15: note = misc_feature - Xaa can be any naturally occurring amino acid
XPXXXQYXSXXXXFX

SEQ ID NO: 2044 - protein, 9 aa, synthetic construct
  REGION 1..9: note = epitope
YLSGVILFE

SEQ ID NO: 2045 - protein, 8 aa, synthetic construct
  REGION 1..8: note = epitope
YLSGVILF

SEQ ID NO: 2046 - protein, 10 aa, synthetic construct
  REGION 1..10: note = epitope
PGALQYLSGV

SEQ ID NO: 2047 - protein, 7 aa, synthetic construct
  REGION 1..7: note = epitope
YLSGVIL

SEQ ID NO: 2048 - protein, 4 aa, synthetic construct
  REGION 1..4: note = epitope
GVIL

SEQ ID NO: 2049 - protein, 4 aa, synthetic construct
  REGION 1..4: note = epitope
GALQ

SEQ ID NO: 2050 - protein, 5 aa, synthetic construct
  REGION 1..5: note = epitope
GVILF

SEQ ID NO: 2051 - protein, 10 aa, synthetic construct
  REGION 1..10: note = epitope
PGALQYLSGV

SEQ ID NO: 2052 - protein, 8 aa, synthetic construct
  REGION 1..8: note = epitope
YLSGVILF

SEQ ID NO: 2053 - protein, 10 aa, synthetic construct
  REGION 1..10: note = epitope
PGALQYLSGV

SEQ ID NO: 2054 - protein, 4 aa, synthetic construct
  REGION 1..4: note = epitope
GALQ

SEQ ID NO: 2055 - protein, 8 aa, synthetic construct
  REGION 1..8: note = epitope
YLSGVILF

SEQ ID NO: 2056 - protein, 5 aa, synthetic construct
  REGION 1..5: note = epitope
GVILF

SEQ ID NO: 2057 - protein, 5 aa, synthetic construct
  REGION 1..5: note = epitope
PGALQ

SEQ ID NO: 2058 - protein, 8 aa, synthetic construct
  REGION 1..8: note = epitope
YLSGVILF

SEQ ID NO: 2059 - protein, 6 aa, synthetic construct
  REGION 1..6: note = epitope
YLSGVI

SEQ ID NO: 2060 - protein, 8 aa, synthetic construct
  REGION 1..8: note = epitope
YLSGVILF

SEQ ID NO: 2061 - protein, 4 aa, synthetic construct
  REGION 1..4: note = epitope
LSGV

SEQ ID NO: 2062 - protein, 6 aa, synthetic construct
  REGION 1..6: note = epitope
LSGVIL

SEQ ID NO: 2063 - protein, 9 aa, synthetic construct
  REGION 1..9: note = epitope
TPGALQYLS

SEQ ID NO: 2064 - protein, 8 aa, synthetic construct
  REGION 1..8: note = epitope
YLSGVILF

SEQ ID NO: 2065 - protein, 5 aa, synthetic construct
  REGION 1..5: note = epitope
GVILF

SEQ ID NO: 2066 - protein, 8 aa, synthetic construct
  REGION 1..8: note = epitope
YLSGVILF

SEQ ID NO: 2067 - protein, 4 aa, synthetic construct
  REGION 1..4: note = epitope
GVIL

SEQ ID NO: 2068 - protein, 15 aa, synthetic construct
  REGION 1..15: note = epitope
PPYCTIAPFGIFGTN

SEQ ID NO: 2069 - protein, 15 aa, synthetic construct
  REGION 1..15: note = epitope
  REGION 1..2: note = misc_feature - Xaa can be any naturally occurring amino acid
  SITE 4: note = misc_feature - Xaa can be any naturally occurring amino acid
  SITE 6: note = misc_feature - Xaa can be any naturally occurring amino acid
XXYXTXAPFGIFGTN

SEQ ID NO: 2070 - protein, 9 aa, synthetic construct
  REGION 1..9: note = epitope
YCTIAPFGI

SEQ ID NO: 2071 - protein, 5 aa, synthetic construct
  REGION 1..5: note = epitope
CTIAP

SEQ ID NO: 2072 - protein, 8 aa, synthetic construct
  REGION 1..8: note = epitope
PFGIFGTN

SEQ ID NO: 2073 - protein, 8 aa, synthetic construct
  REGION 1..8: note = epitope
  SITE 3: note = misc_feature - Xaa can be any naturally occurring amino acid
  REGION 6..8: note = misc_feature - Xaa can be any naturally occurring amino acid
PFXIFXXX

SEQ ID NO: 2074 - protein, 9 aa, synthetic construct
  REGION 1..9: note = epitope
CTIAPFGIF

SEQ ID NO: 2075 - protein, 8 aa, synthetic construct
  REGION 1..8: note = epitope
PFGIFGTN

SEQ ID NO: 2076 - protein, 6 aa, synthetic construct
  REGION 1..6: note = epitope
GIFGTN

SEQ ID NO: 2077 - protein, 5 aa, synthetic construct
  REGION 1..5: note = epitope
CTIAP

SEQ ID NO: 2078 - protein, 9 aa, synthetic construct
  REGION 1..9: note = epitope
YCTIAPFGI

SEQ ID NO: 2079 - protein, 8 aa, synthetic construct
  REGION 1..8: note = epitope
CTIAPFGI

SEQ ID NO: 2080 - protein, 8 aa, synthetic construct
  REGION 1..8: note = epitope
PFGIFGTN

SEQ ID NO: 2081 - protein, 6 aa, synthetic construct
  REGION 1..6: note = epitope
GIFGTN

SEQ ID NO: 2082 - protein, 15 aa, synthetic construct
  REGION 1..15: note = epitope
  REGION 1..2: note = misc_feature - Xaa can be any naturally occurring amino acid
  REGION 4..7: note = misc_feature - Xaa can be any naturally occurring amino acid
  SITE 10: note = misc_feature - Xaa can be any naturally occurring amino acid
  SITE 13: note = misc_feature - Xaa can be any naturally occurring amino acid
XXYXXXXPFXIFXTN

SEQ ID NO: 2083 - protein, 10 aa, synthetic construct
  REGION 1..10: note = epitope
YCTIAPFGIF

SEQ ID NO: 2084 - protein, 8 aa, synthetic construct
  REGION 1..8: note = epitope
CTIAPFGI

SEQ ID NO: 2085 - protein, 8 aa, synthetic construct
  REGION 1..8: note = epitope
PFGIFGTN

SEQ ID NO: 2086 - protein, 10 aa, synthetic construct
  REGION 1..10: note = epitope
YCTIAPFGIF

SEQ ID NO: 2087 - protein, 8 aa, synthetic construct
  REGION 1..8: note = epitope
CTIAPFGI

SEQ ID NO: 2088 - protein, 6 aa, synthetic construct
  REGION 1..6: note = epitope
GIFGTN

SEQ ID NO: 2089 - protein, 10 aa, synthetic construct
  REGION 1..10: note = epitope
YCTIAPFGIF

SEQ ID NO: 2090 - protein, 5 aa, synthetic construct
  REGION 1..5: note = epitope
CTIAP

SEQ ID NO: 2091 - protein, 8 aa, synthetic construct
  REGION 1..8: note = epitope
PFGIFGTN

SEQ ID NO: 2092 - protein, 8 aa, synthetic construct
  REGION 1..8: note = epitope
  SITE 3: note = misc_feature - Xaa can be any naturally occurring amino acid
  REGION 6..8: note = misc_feature - Xaa can be any naturally occurring amino acid
PFXIFXXX

SEQ ID NO: 2093 - protein, 9 aa, synthetic construct
  REGION 1..9: note = epitope
YCTIAPFGI

SEQ ID NO: 2094 - protein, 7 aa, synthetic construct
  REGION 1..7: note = epitope
CTIAPFG

SEQ ID NO: 2095 - protein, 6 aa, synthetic construct
  REGION 1..6: note = epitope
GIFGTN

SEQ ID NO: 2096 - protein, 8 aa, synthetic construct
  REGION 1..8: note = epitope
CTIAPFGI

SEQ ID NO: 2097 - protein, 8 aa, synthetic construct
  REGION 1..8: note = epitope
PFGIFGTN

SEQ ID NO: 2098 - protein, 9 aa, synthetic construct
  REGION 1..9: note = epitope
CTIAPFGIF

SEQ ID NO: 2099 - protein, 8 aa, synthetic construct
  REGION 1..8: note = epitope
  SITE 3: note = misc_feature - Xaa can be any naturally occurring amino acid
  REGION 6..8: note = misc_feature - Xaa can be any naturally occurring amino acid
PFXIFXXX

SEQ ID NO: 2100 - protein, 8 aa, synthetic construct
  REGION 1..8: note = epitope
PFGIFGTN

SEQ ID NO: 2101 - protein, 15 aa, synthetic construct
  REGION 1..15: note = epitope
  REGION 1..2: note = misc_feature - Xaa can be any naturally occurring amino acid
  REGION 4..7: note = misc_feature - Xaa can be any naturally occurring amino acid
  REGION 10..11: note = misc_feature - Xaa can be any naturally occurring amino acid
  REGION 13..15: note = misc_feature - Xaa can be any naturally occurring amino acid
XXYXXXXPFXXFXXX

SEQ ID NO: 2102 - protein, 9 aa, synthetic construct
  REGION 1..9: note = epitope
CTIAPFGIF

SEQ ID NO: 2103 - protein, 5 aa, synthetic construct
  REGION 1..5: note = epitope
CTIAP

SEQ ID NO: 2104 - protein, 8 aa, synthetic construct
  REGION 1..8: note = epitope
PFGIFGTN

SEQ ID NO: 2105 - protein, 9 aa, synthetic construct
  REGION 1..9: note = epitope
CTIAPFGIF

SEQ ID NO: 2106 - protein, 7 aa, synthetic construct
  REGION 1..7: note = epitope
FGIFGTN

SEQ ID NO: 2107 - protein, 9 aa, synthetic construct
  REGION 1..9: note = epitope
CTIAPFGIF

SEQ ID NO: 2108 - protein, 6 aa, synthetic construct
  REGION 1..6: note = epitope
GIFGTN

SEQ ID NO: 2109 - protein, 9 aa, synthetic construct
  REGION 1..9: note = epitope
CTIAPFGIF

SEQ ID NO: 2110 - protein, 8 aa, synthetic construct
  REGION 1..8: note = epitope
PFGIFGTN

SEQ ID NO: 2111 - protein, 15 aa, synthetic construct
  REGION 1..15: note = epitope
  REGION 1..2: note = misc_feature - Xaa can be any naturally occurring amino acid
  REGION 4..6: note = misc_feature - Xaa can be any naturally occurring amino acid
  SITE 14: note = misc_feature - Xaa can be any naturally occurring amino acid
XXYXXXAPFGIFGXN

SEQ ID NO: 2112 - protein, 10 aa, synthetic construct
  REGION 1..10: note = epitope
YCTIAPFGIF

SEQ ID NO: 2113 - protein, 6 aa, synthetic construct
  REGION 1..6: note = epitope
YCTIAP

SEQ ID NO: 2114 - protein, 8 aa, synthetic construct
  REGION 1..8: note = epitope
PFGIFGTN

SEQ ID NO: 2115 - protein, 9 aa, synthetic construct
  REGION 1..9: note = epitope
CTIAPFGIF

SEQ ID NO: 2116 - protein, 5 aa, synthetic construct
  REGION 1..5: note = epitope
CTIAP

SEQ ID NO: 2117 - protein, 8 aa, synthetic construct
  REGION 1..8: note = epitope
PFGIFGTN

SEQ ID NO: 2118 - protein, 8 aa, synthetic construct
  REGION 1..8: note = epitope
  SITE 3: note = misc_feature - Xaa can be any naturally occurring amino acid
  REGION 6..8: note = misc_feature - Xaa can be any naturally occurring amino acid
PFXIFXXX

SEQ ID NO: 2119 - protein, 8 aa, synthetic construct
  REGION 1..8: note = epitope
CTIAPFGI

SEQ ID NO: 2120 - protein, 4 aa, synthetic construct
  REGION 1..4: note = epitope
CTIA

SEQ ID NO: 2121 - protein, 8 aa, synthetic construct
  REGION 1..8: note = epitope
PFGIFGTN

SEQ ID NO: 2122 - protein, 15 aa, synthetic construct
  REGION 1..15: note = epitope
  REGION 1..7: note = misc_feature - Xaa can be any naturally occurring amino acid
  SITE 10: note = misc_feature - Xaa can be any naturally occurring amino acid
  REGION 13..14: note = misc_feature - Xaa can be any naturally occurring amino acid
XXXXXXXPFXIFXXN

SEQ ID NO: 2123 - protein, 10 aa, synthetic construct
  REGION 1..10: note = epitope
YCTIAPFGIF

SEQ ID NO: 2124 - protein, 8 aa, synthetic construct
  REGION 1..8: note = epitope
CTIAPFGI

SEQ ID NO: 2125 - protein, 7 aa, synthetic construct
  REGION 1..7: note = epitope
FGIFGTN

SEQ ID NO: 2126 - protein, 15 aa, synthetic construct
  REGION 1..15: note = epitope
  REGION 1..7: note = misc_feature - Xaa can be any naturally occurring amino acid
  SITE 10: note = misc_feature - Xaa can be any naturally occurring amino acid
  REGION 13..15: note = misc_feature - Xaa can be any naturally occurring amino acid
XXXXXXXPFXIFXXX

SEQ ID NO: 2127 - protein, 5 aa, synthetic construct
  REGION 1..5: note = epitope
CTIAP

SEQ ID NO: 2128 - protein, 15 aa, synthetic construct
  REGION 1..15: note = epitope
  REGION 1..2: note = misc_feature - Xaa can be any naturally occurring amino acid
  SITE 4: note = misc_feature - Xaa can be any naturally occurring amino acid
  REGION 6..7: note = misc_feature - Xaa can be any naturally occurring amino acid
  REGION 13..15: note = misc_feature - Xaa can be any naturally occurring amino acid
XXYXTXXPFGIFXXX

SEQ ID NO: 2129 - protein, 10 aa, synthetic construct
  REGION 1..10: note = epitope
YCTIAPFGIF

SEQ ID NO: 2130 - protein, 8 aa, synthetic construct
  REGION 1..8: note = epitope
PFGIFGTN

SEQ ID NO: 2131 - protein, 15 aa, synthetic construct
  REGION 1..15: note = epitope
  REGION 1..7: note = misc_feature - Xaa can be any naturally occurring amino acid
  SITE 10: note = misc_feature - Xaa can be any naturally occurring amino acid
  REGION 13..15: note = misc_feature - Xaa can be any naturally occurring amino acid
XXXXXXXPFXIFXXX

SEQ ID NO: 2132 - protein, 10 aa, synthetic construct
  REGION 1..10: note = epitope
YCTIAPFGIF

SEQ ID NO: 2133 - protein, 9 aa, synthetic construct
  REGION 1..9: note = epitope
YCTIAPFGI

SEQ ID NO: 2134 - protein, 15 aa, synthetic construct
  REGION 1..15: note = epitope
  REGION 1..7: note = misc_feature - Xaa can be any naturally occurring amino acid
  SITE 10: note = misc_feature - Xaa can be any naturally occurring amino acid
  REGION 13..14: note = misc_feature - Xaa can be any naturally occurring amino acid
XXXXXXXPFXIFXXN

SEQ ID NO: 2135 - protein, 10 aa, synthetic construct
  REGION 1..10: note = epitope
PPYCTIAPFG

SEQ ID NO: 2136 - protein, 9 aa, synthetic construct
  REGION 1..9: note = epitope
CTIAPFGIF

SEQ ID NO: 2137 - protein, 9 aa, synthetic construct
  REGION 1..9: note = epitope
  REGION 1..4: note = misc_feature - Xaa can be any naturally occurring amino acid
  SITE 7: note = misc_feature - Xaa can be any naturally occurring amino acid
XXXXPFXIF

SEQ ID NO: 2138 - protein, 4 aa, synthetic construct
  REGION 1..4: note = epitope
FGTN

SEQ ID NO: 2139 - protein, 15 aa, synthetic construct
  REGION 1..15: note = epitope
  REGION 1..2: note = misc_feature - Xaa can be any naturally occurring amino acid
  REGION 4..7: note = misc_feature - Xaa can be any naturally occurring amino acid
XXYXXXXPFGIFGTN

SEQ ID NO: 2140 - protein, 10 aa, synthetic construct
  REGION 1..10: note = epitope
YCTIAPFGIF

SEQ ID NO: 2141 - protein, 10 aa, synthetic construct
  REGION 1..10: note = epitope
  REGION 2..5: note = misc_feature - Xaa can be any naturally occurring amino acid
YXXXXPFGIF

SEQ ID NO: 2142 - protein, 10 aa, synthetic construct
  REGION 1..10: note = epitope
  REGION 1..5: note = misc_feature - Xaa can be any naturally occurring amino acid
XXXXXPFGIF

SEQ ID NO: 2143 - protein, 10 aa, synthetic construct
  REGION 1..10: note = epitope
IAPFGIFGTN

SEQ ID NO: 2144 - protein, 7 aa, synthetic construct
  REGION 1..7: note = epitope
FGIFGTN

SEQ ID NO: 2145 - protein, 7 aa, synthetic construct
  REGION 1..7: note = epitope
  REGION 5..7: note = misc_feature - Xaa can be any naturally occurring amino acid
FGIFXXX

SEQ ID NO: 2146 - protein, 15 aa, synthetic construct
  REGION 1..15: note = epitope
  REGION 1..7: note = misc_feature - Xaa can be any naturally occurring amino acid
  SITE 10: note = misc_feature - Xaa can be any naturally occurring amino acid
  REGION 13..15: note = misc_feature - Xaa can be any naturally occurring amino acid
XXXXXXXPFXIFXXX

SEQ ID NO: 2147 - protein, 9 aa, synthetic construct
  REGION 1..9: note = epitope
CTIAPFGIF

SEQ ID NO: 2148 - protein, 8 aa, synthetic construct
  REGION 1..8: note = epitope
PFGIFGTN

SEQ ID NO: 2149 - protein, 4 aa, synthetic construct
  REGION 1..4: note = epitope
FGIF

SEQ ID NO: 2150 - protein, 15 aa, synthetic construct
  REGION 1..15: note = epitope
  REGION 1..7: note = misc_feature - Xaa can be any naturally occurring amino acid
  REGION 13..15: note = misc_feature - Xaa can be any naturally occurring amino acid
XXXXXXXPFGIFXXX

SEQ ID NO: 2151 - protein, 9 aa, synthetic construct
  REGION 1..9: note = epitope
YCTIAPFGI

SEQ ID NO: 2152 - protein, 10 aa, synthetic construct
  REGION 1..10: note = epitope
IAPFGIFGTN

SEQ ID NO: 2153 - protein, 6 aa, synthetic construct
  REGION 1..6: note = epitope
GIFGTN

SEQ ID NO: 2154 - protein, 15 aa, synthetic construct
  REGION 1..15: note = epitope
YSQPQQPISQQQQQQ

SEQ ID NO: 2155 - protein, 10 aa, synthetic construct
  REGION 1..10: note = epitope
YSQPQQPISQ

SEQ ID NO: 2156 - protein, 9 aa, synthetic construct
  REGION 1..9: note = epitope
YSQPQQPIS

SEQ ID NO: 2157 - protein, 5 aa, synthetic construct
  REGION 1..5: note = epitope
SQPQQ

SEQ ID NO: 2158 - protein, 10 aa, synthetic construct
  REGION 1..10: note = epitope
YSQPQQPISQ

SEQ ID NO: 2159 - protein, 8 aa, synthetic construct
  REGION 1..8: note = epitope
YSQPQQPI

SEQ ID NO: 2160 - protein, 5 aa, synthetic construct
  REGION 1..5: note = epitope
SQPQQ

SEQ ID NO: 2161 - protein, 9 aa, synthetic construct
  REGION 1..9: note = epitope
PQQPISQQQ

SEQ ID NO: 2162 - protein, 6 aa, synthetic construct
  REGION 1..6: note = epitope
QQPISQ

SEQ ID NO: 2163 - protein, 9 aa, synthetic construct
  REGION 1..9: note = epitope
SQPQQPISQ

SEQ ID NO: 2164 - protein, 5 aa, synthetic construct
  REGION 1..5: note = epitope
SQPQQ

SEQ ID NO: 2165 - protein, 10 aa, synthetic construct
  REGION 1..10: note = epitope
YSQPQQPISQ

SEQ ID NO: 2166 - protein, 8 aa, synthetic construct
  REGION 1..8: note = epitope
SQPQQPIS

SEQ ID NO: 2167 - protein, 5 aa, synthetic construct
  REGION 1..5: note = epitope
SQPQQ

SEQ ID NO: 2168 - protein, 15 aa, synthetic construct
  REGION 1..15: note = epitope
  REGION 2..11: note = misc_feature - Xaa can be any naturally occurring amino acid
  SITE 15: note = misc_feature - Xaa can be any naturally occurring amino acid
YXXXXXXXXXXQQQX

SEQ ID NO: 2169 - protein, 8 aa, synthetic construct
  REGION 1..8: note = epitope
YSQPQQPI

SEQ ID NO: 2170 - protein, 6 aa, synthetic construct
  REGION 1..6: note = epitope
SQPQQP

SEQ ID NO: 2171 - protein, 5 aa, synthetic construct
  REGION 1..5: note = epitope
SQPQQ

SEQ ID NO: 2172 - protein, 10 aa, synthetic construct
  REGION 1..10: note = epitope
QQPISQQQQQ

SEQ ID NO: 2173 - protein, 10 aa, synthetic construct
  REGION 1..10: note = epitope
YSQPQQPISQ

SEQ ID NO: 2174 - protein, 6 aa, synthetic construct
  REGION 1..6: note = epitope
YSQPQQ

SEQ ID NO: 2175 - protein, 5 aa, synthetic construct
  REGION 1..5: note = epitope
SQPQQ

SEQ ID NO: 2176 - protein, 10 aa, synthetic construct
  REGION 1..10: note = epitope
YSQPQQPISQ

SEQ ID NO: 2177 - protein, 5 aa, synthetic construct
  REGION 1..5: note = epitope
SQPQQ

SEQ ID NO: 2178 - protein, 10 aa, synthetic construct
  REGION 1..10: note = epitope
YSQPQQPISQ

SEQ ID NO: 2179 - protein, 8 aa, synthetic construct
  REGION 1..8: note = epitope
YSQPQQPI

SEQ ID NO: 2180 - protein, 5 aa, synthetic construct
  REGION 1..5: note = epitope
SQPQQ

SEQ ID NO: 2181 - protein, 10 aa, synthetic construct
  REGION 1..10: note = epitope
YSQPQQPISQ

SEQ ID NO: 2182 - protein, 5 aa, synthetic construct
  REGION 1..5: note = epitope
SQPQQ

SEQ ID NO: 2183 - protein, 4 aa, synthetic construct
  REGION 1..4: note = epitope
QPQQ

SEQ ID NO: 2184 - protein, 10 aa, synthetic construct
  REGION 1..10: note = epitope
YSQPQQPISQ

SEQ ID NO: 2185 - protein, 8 aa, synthetic construct
  REGION 1..8: note = epitope
YSQPQQPI

SEQ ID NO: 2186 - protein, 5 aa, synthetic construct
  REGION 1..5: note = epitope
SQPQQ

SEQ ID NO: 2187 - protein, 5 aa, synthetic construct
  REGION 1..5: note = epitope
SQPQQ

SEQ ID NO: 2188 - protein, 15 aa, synthetic construct
  REGION 1..15: note = epitope
  SITE 2: note = misc_feature - Xaa can be any naturally occurring amino acid
  REGION 4..11: note = misc_feature - Xaa can be any naturally occurring amino acid
  REGION 14..15: note = misc_feature - Xaa can be any naturally occurring amino acid
YXQXXXXXXXXQQXX

SEQ ID NO: 2189 - protein, 10 aa, synthetic construct
  REGION 1..10: note = epitope
YSQPQQPISQ

SEQ ID NO: 2190 - protein, 4 aa, synthetic construct
  REGION 1..4: note = epitope
QPQQ

SEQ ID NO: 2191 - protein, 5 aa, synthetic construct
  REGION 1..5: note = epitope
SQPQQ

SEQ ID NO: 2192 - protein, 4 aa, synthetic construct
  REGION 1..4: note = epitope
QPQQ

SEQ ID NO: 2193 - protein, 5 aa, synthetic construct
  REGION 1..5: note = epitope
SQPQQ

SEQ ID NO: 2194 - protein, 6 aa, synthetic construct
  REGION 1..6: note = epitope
YSQPQQ

SEQ ID NO: 2195 - protein, 5 aa, synthetic construct
  REGION 1..5: note = epitope
SQPQQ

SEQ ID NO: 2196 - protein, 10 aa, synthetic construct
  REGION 1..10: note = epitope
YSQPQQPISQ

SEQ ID NO: 2197 - protein, 5 aa, synthetic construct
  REGION 1..5: note = epitope
SQPQQ

SEQ ID NO: 2198 - protein, 5 aa, synthetic construct
  REGION 1..5: note = epitope
SQPQQ

SEQ ID NO: 2199 - protein, 15 aa, synthetic construct
  REGION 1..15: note = epitope
  REGION 2..4: note = misc_feature - Xaa can be any naturally occurring amino acid
  REGION 6..10: note = misc_feature - Xaa can be any naturally occurring amino acid
  REGION 14..15: note = misc_feature - Xaa can be any naturally occurring amino acid
YXXXQXXXXXQQQXX

SEQ ID NO: 2200 - protein, 10 aa, synthetic construct
  REGION 1..10: note = epitope
YSQPQQPISQ

SEQ ID NO: 2201 - protein, 8 aa, synthetic construct
  REGION 1..8: note = epitope
YSQPQQPI

SEQ ID NO: 2202 - protein, 5 aa, synthetic construct
  REGION 1..5: note = epitope
SQPQQ

SEQ ID NO: 2203 - protein, 7 aa, synthetic construct
  REGION 1..7: note = epitope
SQQQQQQ

SEQ ID NO: 2204 - protein, 15 aa, synthetic construct
  REGION 1..15: note = epitope
  REGION 2..10: note = misc_feature - Xaa can be any naturally occurring amino acid
YXXXXXXXXXQQQQQ

SEQ ID NO: 2205 - protein, 9 aa, synthetic construct
  REGION 1..9: note = epitope
YSQPQQPIS

SEQ ID NO: 2206 - protein, 7 aa, synthetic construct
  REGION 1..7: note = epitope
SQPQQPI

SEQ ID NO: 2207 - protein, 10 aa, synthetic construct
  REGION 1..10: note = epitope
QQPISQQQQQ

SEQ ID NO: 2208 - protein, 10 aa, synthetic construct
  REGION 1..10: note = epitope
  REGION 1..6: note = misc_feature - Xaa can be any naturally occurring amino acid
XXXXXXQQQQ

SEQ ID NO: 2209 - protein, 6 aa, synthetic construct
  REGION 1..6: note = epitope
YSQPQQ

SEQ ID NO: 2210 - protein, 5 aa, synthetic construct
  REGION 1..5: note = epitope
SQPQQ

SEQ ID NO: 2211 - protein, 10 aa, synthetic construct
  REGION 1..10: note = epitope
YSQPQQPISQ

SEQ ID NO: 2212 - protein, 5 aa, synthetic construct
  REGION 1..5: note = epitope
SQPQQ

SEQ ID NO: 2213 - protein, 10 aa, synthetic construct
  REGION 1..10: note = epitope
YSQPQQPISQ

SEQ ID NO: 2214 - protein, 4 aa, synthetic construct
  REGION 1..4: note = epitope
QPQQ

SEQ ID NO: 2215 - protein, 9 aa, synthetic construct
  REGION 1..9: note = epitope
YSQPQQPIS

SEQ ID NO: 2216 - protein, 5 aa, synthetic construct
  REGION 1..5: note = epitope
SQPQQ

SEQ ID NO: 2217 - protein, 15 aa, synthetic construct
  REGION 1..15: note = epitope
VSRLLRGIRNYRVAI

SEQ ID NO: 2218 - protein, 10 aa, synthetic construct
  REGION 1..10: note = epitope
SRLLRGIRNY

SEQ ID NO: 2219 - protein, 8 aa, synthetic construct
  REGION 1..8: note = epitope
IRNYRVAI

SEQ ID NO: 2220 - protein, 4 aa, synthetic construct
  REGION 1..4: note = epitope
NYRV

SEQ ID NO: 2221 - protein, 5 aa, synthetic construct
  REGION 1..5: note = epitope
IRNYR

SEQ ID NO: 2222 - protein, 9 aa, synthetic construct
  REGION 1..9: note = epitope
RLLRGIRNY

SEQ ID NO: 2223 - protein, 7 aa, synthetic construct
  REGION 1..7: note = epitope
IRNYRVA

SEQ ID NO: 2224 - protein, 7 aa, synthetic construct
  REGION 1..7: note = epitope
IRNYRVA

SEQ ID NO: 2225 - protein, 10 aa, synthetic construct
  REGION 1..10: note = epitope
VSRLLRGIRN

SEQ ID NO: 2226 - protein, 4 aa, synthetic construct
  REGION 1..4: note = epitope
RNYR

SEQ ID NO: 2227 - protein, 7 aa, synthetic construct
  REGION 1..7: note = epitope
LLRGIRN

SEQ ID NO: 2228 - protein, 6 aa, synthetic construct
  REGION 1..6: note = epitope
NYRVAI

SEQ ID NO: 2229 - protein, 15 aa, synthetic construct
  REGION 1..15: note = epitope
  REGION 1..5: note = misc_feature - Xaa can be any naturally occurring amino acid
  SITE 9: note = misc_feature - Xaa can be any naturally occurring amino acid
  REGION 12..15: note = misc_feature - Xaa can be any naturally occurring amino acid
XXXXXRGIXNYXXXX

SEQ ID NO: 2230 - protein, 6 aa, synthetic construct
  REGION 1..6: note = epitope
IRNYRV

SEQ ID NO: 2231 - protein, 4 aa, synthetic construct
  REGION 1..4: note = epitope
IRNY

SEQ ID NO: 2232 - protein, 15 aa, synthetic construct
  REGION 1..15: note = epitope
  REGION 1..5: note = misc_feature - Xaa can be any naturally occurring amino acid
  REGION 8..9: note = misc_feature - Xaa can be any naturally occurring amino acid
  REGION 12..14: note = misc_feature - Xaa can be any naturally occurring amino acid
XXXXXRGXXNYXXXI

SEQ ID NO: 2233 - protein, 8 aa, synthetic construct
  REGION 1..8: note = epitope
IRNYRVAI

SEQ ID NO: 2234 - protein, 4 aa, synthetic construct
  REGION 1..4: note = epitope
RNYR

SEQ ID NO: 2235 - protein, 9 aa, synthetic construct
  REGION 1..9: note = epitope
SRLLRGIRN

SEQ ID NO: 2236 - protein, 8 aa, synthetic construct
  REGION 1..8: note = epitope
IRNYRVAI

SEQ ID NO: 2237 - protein, 4 aa, synthetic construct
  REGION 1..4: note = epitope
NYRV

SEQ ID NO: 2238 - protein, 10 aa, synthetic construct
  REGION 1..10: note = epitope
LLRGIRNYRV

SEQ ID NO: 2239 - protein, 6 aa, synthetic construct
  REGION 1..6: note = epitope
NYRVAI

SEQ ID NO: 2240 - protein, 8 aa, synthetic construct
  REGION 1..8: note = epitope
IRNYRVAI

SEQ ID NO: 2241 - protein, 8 aa, synthetic construct
  REGION 1..8: note = epitope
RLLRGIRN

SEQ ID NO: 2242 - protein, 8 aa, synthetic construct
  REGION 1..8: note = epitope
IRNYRVAI

SEQ ID NO: 2243 - protein, 9 aa, synthetic construct
  REGION 1..9: note = epitope
RLLRGIRNY

SEQ ID NO: 2244 - protein, 6 aa, synthetic construct
  REGION 1..6: note = epitope
RNYRVA

SEQ ID NO: 2245 - protein, 8 aa, synthetic construct
  REGION 1..8: note = epitope
SRLLRGIR

SEQ ID NO: 2246 - protein, 5 aa, synthetic construct
  REGION 1..5: note = epitope
SRLLR

SEQ ID NO: 2247 - protein, 10 aa, synthetic construct
  REGION 1..10: note = epitope
LLRGIRNYRV

SEQ ID NO: 2248 - protein, 8 aa, synthetic construct
  REGION 1..8: note = epitope
IRNYRVAI

SEQ ID NO: 2249 - protein, 15 aa, synthetic construct
  REGION 1..15: note = epitope
  REGION 1..4: note = misc_feature - Xaa can be any naturally occurring amino acid
  REGION 6..7: note = misc_feature - Xaa can be any naturally occurring amino acid
  SITE 9: note = misc_feature - Xaa can be any naturally occurring amino acid
  REGION 12..15: note = misc_feature - Xaa can be any naturally occurring amino acid
XXXXLXXIXNYXXXX

SEQ ID NO: 2250 - protein, 9 aa, synthetic construct
  REGION 1..9: note = epitope
SRLLRGIRN

SEQ ID NO: 2251 - protein, 8 aa, synthetic construct
  REGION 1..8: note = epitope
SRLLRGIR

SEQ ID NO: 2252 - protein, 10 aa, synthetic construct
  REGION 1..10: note = epitope
LLRGIRNYRV

SEQ ID NO: 2253 - protein, 7 aa, synthetic construct
  REGION 1..7: note = epitope
RNYRVAI

SEQ ID NO: 2254 - protein, 4 aa, synthetic construct
  REGION 1..4: note = epitope
NYRV

SEQ ID NO: 2255 - protein, 10 aa, synthetic construct
  REGION 1..10: note = epitope
LLRGIRNYRV

SEQ ID NO: 2256 - protein, 6 aa, synthetic construct
  REGION 1..6: note = epitope
LRGIRN

SEQ ID NO: 2257 - protein, 9 aa, synthetic construct
  REGION 1..9: note = epitope
SRLLRGIRN

SEQ ID NO: 2258 - protein, 10 aa, synthetic construct
  REGION 1..10: note = epitope
LRGIRNYRVA

SEQ ID NO: 2259 - protein, 5 aa, synthetic construct
  REGION 1..5: note = epitope
RNYRV

SEQ ID NO: 2260 - protein, 5 aa, synthetic construct
  REGION 1..5: note = epitope
SRLLR

SEQ ID NO: 2261 - protein, 10 aa, synthetic construct
  REGION 1..10: note = epitope
LLRGIRNYRV

SEQ ID NO: 2262 - protein, 7 aa, synthetic construct
  REGION 1..7: note = epitope
RNYRVAI

SEQ ID NO: 2263 - protein, 5 aa, synthetic construct
  REGION 1..5: note = epitope
SRLLR

SEQ ID NO: 2264 - protein, 6 aa, synthetic construct
  REGION 1..6: note = epitope
NYRVAI

SEQ ID NO: 2265 - protein, 15 aa, synthetic construct
  REGION 1..15: note = epitope
LGGIDKRVIERFEKE

SEQ ID NO: 2266 - protein, 7 aa, synthetic construct
  REGION 1..7: note = epitope
GGIDKRV

SEQ ID NO: 2267 - protein, 9 aa, synthetic construct
  REGION 1..9: note = epitope
KRVIERFEK

SEQ ID NO: 2268 - protein, 5 aa, synthetic construct
  REGION 1..5: note = epitope
ERFEK

SEQ ID NO: 2269 - protein, 6 aa, synthetic construct
  REGION 1..6: note = epitope
LGGIDK

SEQ ID NO: 2270 - protein, 10 aa, synthetic construct
  REGION 1..10: note = epitope
DKRVIERFEK

SEQ ID NO: 2271 - protein, 8 aa, synthetic construct
  REGION 1..8: note = epitope
LGGIDKRV

SEQ ID NO: 2272 - protein, 10 aa, synthetic construct
  REGION 1..10: note = epitope
GIDKRVIERF

SEQ ID NO: 2273 - protein, 6 aa, synthetic construct
  REGION 1..6: note = epitope
GIDKRV

SEQ ID NO: 2274 - protein, 10 aa, synthetic construct
  REGION 1..10: note = epitope
DKRVIERFEK

SEQ ID NO: 2275 - protein, 9 aa, synthetic construct
  REGION 1..9: note = epitope
KRVIERFEK

SEQ ID NO: 2276 - protein, 5 aa, synthetic construct
  REGION 1..5: note = epitope
GGIDK

SEQ ID NO: 2277 - protein, 10 aa, synthetic construct
  REGION 1..10: note = epitope
DKRVIERFEK

SEQ ID NO: 2278 - protein, 15 aa, synthetic construct
  REGION 1..15: note = epitope
  REGION 2..5: note = misc_feature - Xaa can be any naturally occurring amino acid
  REGION 7..10: note = misc_feature - Xaa can be any naturally occurring amino acid
  SITE 13: note = misc_feature - Xaa can be any naturally occurring amino acid
LXXXXKXXXXRFXKE

SEQ ID NO: 2279 - protein, 6 aa, synthetic construct
  REGION 1..6: note = epitope
LGGIDK

SEQ ID NO: 2280 - protein, 10 aa, synthetic construct
  REGION 1..10: note = epitope
DKRVIERFEK

SEQ ID NO: 2281 - protein, 10 aa, synthetic construct
  REGION 1..10: note = epitope
  SITE 1: note = misc_feature - Xaa can be any naturally occurring amino acid
  REGION 3..6: note = misc_feature - Xaa can be any naturally occurring amino acid
  SITE 9: note = misc_feature - Xaa can be any naturally occurring amino acid
XKXXXXRFXK

SEQ ID NO: 2282 - protein, 8 aa, synthetic construct
  REGION 1..8: note = epitope
IDKRVIER

SEQ ID NO: 2283 - protein, 6 aa, synthetic construct
  REGION 1..6: note = epitope
ERFEKE

SEQ ID NO: 2284 - protein, 6 aa, synthetic construct
  REGION 1..6: note = epitope
LGGIDK

SEQ ID NO: 2285 - protein, 4 aa, synthetic construct
  REGION 1..4: note = epitope
GIDK

SEQ ID NO: 2286 - protein, 10 aa, synthetic construct
  REGION 1..10: note = epitope
DKRVIERFEK

SEQ ID NO: 2287 - protein, 9 aa, synthetic construct
  REGION 1..9: note = epitope
KRVIERFEK

SEQ ID NO: 2288 - protein, 7 aa, synthetic construct
  REGION 1..7: note = epitope
KRVIERF

SEQ ID NO: 2289 - protein, 5 aa, synthetic construct
  REGION 1..5: note = epitope
GGIDK

SEQ ID NO: 2290 - protein, 9 aa, synthetic construct
  REGION 1..9: note = epitope
DKRVIERFE

SEQ ID NO: 2291 - protein, 6 aa, synthetic construct
  REGION 1..6: note = epitope
LGGIDK

SEQ ID NO: 2292 - protein, 9 aa, synthetic construct
  REGION 1..9: note = epitope
KRVIERFEK

SEQ ID NO: 2293 - protein, 4 aa, synthetic construct
  REGION 1..4: note = epitope
ERFE

SEQ ID NO: 2294 - protein, 10 aa, synthetic construct
  REGION 1..10: note = epitope
LGGIDKRVIE

SEQ ID NO: 2295 - protein, 8 aa, synthetic construct
  REGION 1..8: note = epitope
LGGIDKRV

SEQ ID NO: 2296 - protein, 4 aa, synthetic construct
  REGION 1..4: note = epitope
GIDK

SEQ ID NO: 2297 - protein, 5 aa, synthetic construct
  REGION 1..5: note = epitope
ERFEK

SEQ ID NO: 2298 - protein, 15 aa, synthetic construct
  REGION 1..15: note = epitope
  REGION 2..5: note = misc_feature - Xaa can be any naturally occurring amino acid
  REGION 7..10: note = misc_feature - Xaa can be any naturally occurring amino acid
  REGION 12..13: note = misc_feature - Xaa can be any naturally occurring amino acid
  SITE 15: note = misc_feature - Xaa can be any naturally occurring amino acid
LXXXXKXXXXRXXKX

SEQ ID NO: 2299 - protein, 4 aa, synthetic construct
  REGION 1..4: note = epitope
GIDK

SEQ ID NO: 2300 - protein, 10 aa, synthetic construct
  REGION 1..10: note = epitope
DKRVIERFEK

SEQ ID NO: 2301 - protein, 6 aa, synthetic construct
  REGION 1..6: note = epitope
LGGIDK

SEQ ID NO: 2302 - protein, 10 aa, synthetic construct
  REGION 1..10: note = epitope
IDKRVIERFE

SEQ ID NO: 2303 - protein, 6 aa, synthetic construct
  REGION 1..6: note = epitope
LGGIDK

SEQ ID NO: 2304 - protein, 9 aa, synthetic construct
  REGION 1..9: note = epitope
DKRVIERFE

SEQ ID NO: 2305 - protein, 6 aa, synthetic construct
  REGION 1..6: note = epitope
LGGIDK

SEQ ID NO: 2306 - protein, 4 aa, synthetic construct
  REGION 1..4: note = epitope
GIDK

SEQ ID NO: 2307 - protein, 8 aa, synthetic construct
  REGION 1..8: note = epitope
RVIERFEK

SEQ ID NO: 2308 - protein, 5 aa, synthetic construct
  REGION 1..5: note = epitope
ERFEK

SEQ ID NO: 2309 - protein, 15 aa, synthetic construct
  REGION 1..15: note = epitope
QSRYDAIRAIIYSIV

SEQ ID NO: 2310 - protein, 15 aa, synthetic construct
  REGION 1..15: note = epitope
  REGION 1..2: note = misc_feature - Xaa can be any naturally occurring amino acid
  REGION 4..7: note = misc_feature - Xaa can be any naturally occurring amino acid
  SITE 11: note = misc_feature - Xaa can be any naturally occurring amino acid
  REGION 13..15: note = misc_feature - Xaa can be any naturally occurring amino acid
XXRXXXXRAIXYXXX

SEQ ID NO: 2311 - protein, 15 aa, synthetic construct
  REGION 1..15: note = epitope
  REGION 1..2: note = misc_feature - Xaa can be any naturally occurring amino acid
  SITE 4: note = misc_feature - Xaa can be any naturally occurring amino acid
  REGION 6..7: note = misc_feature - Xaa can be any naturally occurring amino acid
  SITE 9: note = misc_feature - Xaa can be any naturally occurring amino acid
  SITE 11: note = misc_feature - Xaa can be any naturally occurring amino acid
  REGION 13..15: note = misc_feature - Xaa can be any naturally occurring amino acid
XXRXDXXRXIXYXXX

SEQ ID NO: 2312 - protein, 15 aa, synthetic construct
  REGION 1..15: note = epitope
  REGION 1..2: note = misc_feature - Xaa can be any naturally occurring amino acid
  REGION 6..7: note = misc_feature - Xaa can be any naturally occurring amino acid
  SITE 14: note = misc_feature - Xaa can be any naturally occurring amino acid
XXRYDXXRAIIYSXV

SEQ ID NO: 2313 - protein, 15 aa, synthetic construct
  REGION 1..15: note = epitope
  REGION 1..7: note = misc_feature - Xaa can be any naturally occurring amino acid
  SITE 9: note = misc_feature - Xaa can be any naturally occurring amino acid
  SITE 11: note = misc_feature - Xaa can be any naturally occurring amino acid
  REGION 13..14: note = misc_feature - Xaa can be any naturally occurring amino acid
XXXXXXXRXIXYXXV

SEQ ID NO: 2314 - protein, 7 aa, synthetic construct
  REGION 1..7: note = epitope
SRYDAIR

SEQ ID NO: 2315 - protein, 4 aa, synthetic construct
  REGION 1..4: note = epitope
IIYS

SEQ ID NO: 2316 - protein, 15 aa, synthetic construct
  REGION 1..15: note = epitope
  REGION 1..7: note = misc_feature - Xaa can be any naturally occurring amino acid
  SITE 11: note = misc_feature - Xaa can be any naturally occurring amino acid
  REGION 13..15: note = misc_feature - Xaa can be any naturally occurring amino acid
XXXXXXXRAIXYXXX

SEQ ID NO: 2317 - protein, 15 aa, synthetic construct
  REGION 1..15: note = epitope
  REGION 1..2: note = misc_feature - Xaa can be any naturally occurring amino acid
  REGION 5..7: note = misc_feature - Xaa can be any naturally occurring amino acid
  SITE 15: note = misc_feature - Xaa can be any naturally occurring amino acid
XXRYXXXRAIIYSIX

SEQ ID NO: 2318 - protein, 15 aa, synthetic construct
  REGION 1..15: note = epitope
  REGION 1..7: note = misc_feature - Xaa can be any naturally occurring amino acid
  SITE 11: note = misc_feature - Xaa can be any naturally occurring amino acid
  REGION 13..15: note = misc_feature - Xaa can be any naturally occurring amino acid
XXXXXXXRAIXYXXX

SEQ ID NO: 2319 - protein, 15 aa, synthetic construct
  REGION 1..15: note = epitope
  REGION 1..2: note = misc_feature - Xaa can be any naturally occurring amino acid
  REGION 4..7: note = misc_feature - Xaa can be any naturally occurring amino acid
  SITE 9: note = misc_feature - Xaa can be any naturally occurring amino acid
  SITE 11: note = misc_feature - Xaa can be any naturally occurring amino acid
  REGION 13..15: note = misc_feature - Xaa can be any naturally occurring amino acid
XXRXXXXRXIXYXXX

SEQ ID NO: 2320 - protein, 15 aa, synthetic construct
  REGION 1..15: note = epitope
  REGION 1..2: note = misc_feature - Xaa can be any naturally occurring amino acid
  REGION 4..7: note = misc_feature - Xaa can be any naturally occurring amino acid
  SITE 11: note = misc_feature - Xaa can be any naturally occurring amino acid
XXRXXXXRAIXYSIV

SEQ ID NO: 2321 - protein, 15 aa, synthetic construct
  REGION 1..15: note = epitope
  REGION 1..2: note = misc_feature - Xaa can be any naturally occurring amino acid
  REGION 4..7: note = misc_feature - Xaa can be any naturally occurring amino acid
  SITE 11: note = misc_feature - Xaa can be any naturally occurring amino acid
XXRXXXXRAIXYSIV

SEQ ID NO: 2322 - protein, 15 aa, synthetic construct
  REGION 1..15: note = epitope
  REGION 1..2: note = misc_feature - Xaa can be any naturally occurring amino acid
  REGION 4..7: note = misc_feature - Xaa can be any naturally occurring amino acid
  SITE 11: note = misc_feature - Xaa can be any naturally occurring amino acid
  SITE 13: note = misc_feature - Xaa can be any naturally occurring amino acid
  SITE 15: note = misc_feature - Xaa can be any naturally occurring amino acid
XXRXXXXRAIXYXIX

SEQ ID NO: 2323 - protein, 15 aa, synthetic construct
  REGION 1..15: note = epitope
  REGION 1..2: note = misc_feature - Xaa can be any naturally occurring amino acid
  REGION 4..7: note = misc_feature - Xaa can be any naturally occurring amino acid
  SITE 11: note = misc_feature - Xaa can be any naturally occurring amino acid
  REGION 13..15: note = misc_feature - Xaa can be any naturally occurring amino acid
XXRXXXXRAIXYXXX

SEQ ID NO: 2324 - protein, 15 aa, synthetic construct
  REGION 1..15: note = epitope
  REGION 1..7: note = misc_feature - Xaa can be any naturally occurring amino acid
  SITE 15: note = misc_feature - Xaa can be any naturally occurring amino acid
XXXXXXXRAIIYSIX

SEQ ID NO: 2325 - protein, 15 aa, synthetic construct
  REGION 1..15: note = epitope
  REGION 1..7: note = misc_feature - Xaa can be any naturally occurring amino acid
  SITE 15: note = misc_feature - Xaa can be any naturally occurring amino acid
XXXXXXXRAIIYSIX

SEQ ID NO: 2326 - protein, 15 aa, synthetic construct
  REGION 1..15: note = epitope
  REGION 1..7: note = misc_feature - Xaa can be any naturally occurring amino acid
  SITE 9: note = misc_feature - Xaa can be any naturally occurring amino acid
  SITE 11: note = misc_feature - Xaa can be any naturally occurring amino acid
  SITE 13: note = misc_feature - Xaa can be any naturally occurring amino acid
  SITE 15: note = misc_feature - Xaa can be any naturally occurring amino acid
XXXXXXXRXIXYXIX

SEQ ID NO: 2327 - protein, 9 aa, synthetic construct
  REGION 1..9: note = epitope
RYDAIRAII

SEQ ID NO: 2328 - protein, 5 aa, synthetic construct
  REGION 1..5: note = epitope
IIYSI

SEQ ID NO: 2329 - protein, 15 aa, synthetic construct
  REGION 1..15: note = epitope
  REGION 1..7: note = misc_feature - Xaa can be any naturally occurring amino acid
  SITE 13: note = misc_feature - Xaa can be any naturally occurring amino acid
  SITE 15: note = misc_feature - Xaa can be any naturally occurring amino acid
XXXXXXXRAIIYXIX

SEQ ID NO: 2330 - protein, 5 aa, synthetic construct
  REGION 1..5: note = epitope
AIRAI

SEQ ID NO: 2331 - protein, 15 aa, synthetic construct
  REGION 1..15: note = epitope
  REGION 1..2: note = misc_feature - Xaa can be any naturally occurring amino acid
  REGION 4..6: note = misc_feature - Xaa can be any naturally occurring amino acid
XXRXXXIRAIIYSIV

SEQ ID NO: 2332 - protein, 15 aa, synthetic construct
  REGION 1..15: note = epitope
  REGION 1..7: note = misc_feature - Xaa can be any naturally occurring amino acid
  SITE 13: note = misc_feature - Xaa can be any naturally occurring amino acid
  SITE 15: note = misc_feature - Xaa can be any naturally occurring amino acid
XXXXXXXRAIIYXIX

SEQ ID NO: 2333 - protein, 15 aa, synthetic construct
  REGION 1..15: note = epitope
  REGION 1..2: note = misc_feature - Xaa can be any naturally occurring amino acid
  REGION 4..7: note = misc_feature - Xaa can be any naturally occurring amino acid
  SITE 13: note = misc_feature - Xaa can be any naturally occurring amino acid
XXRXXXXRAIIYXIV

SEQ ID NO: 2334 - protein, 15 aa, synthetic construct
  REGION 1..15: note = epitope
  REGION 1..7: note = misc_feature - Xaa can be any naturally occurring amino acid
  SITE 13: note = misc_feature - Xaa can be any naturally occurring amino acid
XXXXXXXRAIIYXIV

SEQ ID NO: 2335 - protein, 15 aa, synthetic construct
  REGION 1..15: note = epitope
  REGION 1..2: note = misc_feature - Xaa can be any naturally occurring amino acid
  REGION 4..7: note = misc_feature - Xaa can be any naturally occurring amino acid
XXRXXXXRAIIYSIV

SEQ ID NO: 2336 - protein, 15 aa, synthetic construct
  REGION 1..15: note = epitope
  REGION 1..7: note = misc_feature - Xaa can be any naturally occurring amino acid
  SITE 15: note = misc_feature - Xaa can be any naturally occurring amino acid
XXXXXXXRAIIYSIX

SEQ ID NO: 2337 - protein, 15 aa, synthetic construct
  REGION 1..15: note = epitope
  REGION 1..2: note = misc_feature - Xaa can be any naturally occurring amino acid
  REGION 4..7: note = misc_feature - Xaa can be any naturally occurring amino acid
  SITE 15: note = misc_feature - Xaa can be any naturally occurring amino acid
XXRXXXXRAIIYSIX

SEQ ID NO: 2338 - protein, 15 aa, synthetic construct
  REGION 1..15: note = epitope
  REGION 1..7: note = misc_feature - Xaa can be any naturally occurring amino acid
  SITE 11: note = misc_feature - Xaa can be any naturally occurring amino acid
  SITE 13: note = misc_feature - Xaa can be any naturally occurring amino acid
  SITE 15: note = misc_feature - Xaa can be any naturally occurring amino acid
XXXXXXXRAIXYXIX

SEQ ID NO: 2339 - protein, 5 aa, synthetic construct
  REGION 1..5: note = epitope
AIIYS

SEQ ID NO: 2340 - protein, 15 aa, synthetic construct
  REGION 1..15: note = epitope
  REGION 1..7: note = misc_feature - Xaa can be any naturally occurring amino acid
  REGION 13..15: note = misc_feature - Xaa can be any naturally occurring amino acid
XXXXXXXRAIIYXXX

SEQ ID NO: 2341 - protein, 15 aa, synthetic construct
  REGION 1..15: note = epitope
  REGION 1..7: note = misc_feature - Xaa can be any naturally occurring amino acid
  SITE 13: note = misc_feature - Xaa can be any naturally occurring amino acid
  SITE 15: note = misc_feature - Xaa can be any naturally occurring amino acid
XXXXXXXRAIIYXIX

SEQ ID NO: 2342 - protein, 15 aa, synthetic construct
  REGION 1..15: note = epitope
HDIDRCAYVTEIVLA

SEQ ID NO: 2343 - protein, 15 aa, synthetic construct
  REGION 1..15: note = epitope
  SITE 1: note = misc_feature - Xaa can be any naturally occurring amino acid
  REGION 3..5: note = misc_feature - Xaa can be any naturally occurring amino acid
  SITE 7: note = misc_feature - Xaa can be any naturally occurring amino acid
  REGION 9..11: note = misc_feature - Xaa can be any naturally occurring amino acid
XDXXXCXYXXXIVLA

SEQ ID NO: 2344 - protein, 8 aa, synthetic construct
  REGION 1..8: note = epitope
HDIDRCAY

SEQ ID NO: 2345 - protein, 7 aa, synthetic construct
  REGION 1..7: note = epitope
YVTEIVL

SEQ ID NO: 2346 - protein, 6 aa, synthetic construct
  REGION 1..6: note = epitope
YVTEIV

SEQ ID NO: 2347 - protein, 4 aa, synthetic construct
  REGION 1..4: note = epitope
VTEI

SEQ ID NO: 2348 - protein, 15 aa, synthetic construct
  REGION 1..15: note = epitope
  REGION 1..4: note = misc_feature - Xaa can be any naturally occurring amino acid
  SITE 11: note = misc_feature - Xaa can be any naturally occurring amino acid
XXXXRCAYVTXIVLA

SEQ ID NO: 2349 - protein, 15 aa, synthetic construct
  REGION 1..15: note = epitope
  REGION 1..5: note = misc_feature - Xaa can be any naturally occurring amino acid
  SITE 7: note = misc_feature - Xaa can be any naturally occurring amino acid
  REGION 9..11: note = misc_feature - Xaa can be any naturally occurring amino acid
XXXXXCXYXXXIVLA

SEQ ID NO: 2350 - protein, 7 aa, synthetic construct
  REGION 1..7: note = epitope
YVTEIVL

SEQ ID NO: 2351 - protein, 7 aa, synthetic construct
  REGION 1..7: note = epitope
  SITE 4: note = misc_feature - Xaa can be any naturally occurring amino acid
YVTXIVL

SEQ ID NO: 2352 - protein, 7 aa, synthetic construct
  REGION 1..7: note = epitope
  REGION 2..4: note = misc_feature - Xaa can be any naturally occurring amino acid
YXXXIVL

SEQ ID NO: 2353 - protein, 15 aa, synthetic construct
  REGION 1..15: note = epitope
  REGION 1..3: note = misc_feature - Xaa can be any naturally occurring amino acid
  SITE 11: note = misc_feature - Xaa can be any naturally occurring amino acid
XXXDRCAYVTXIVLA

SEQ ID NO: 2354 - protein, 15 aa, synthetic construct
  REGION 1..15: note = epitope
  REGION 1..5: note = misc_feature - Xaa can be any naturally occurring amino acid
  SITE 7: note = misc_feature - Xaa can be any naturally occurring amino acid
  SITE 11: note = misc_feature - Xaa can be any naturally occurring amino acid
XXXXXCXYVTXIVLA

SEQ ID NO: 2355 - protein, 15 aa, synthetic construct
  REGION 1..15: note = epitope
  REGION 1..5: note = misc_feature - Xaa can be any naturally occurring amino acid
  SITE 7: note = misc_feature - Xaa can be any naturally occurring amino acid
  REGION 9..11: note = misc_feature - Xaa can be any naturally occurring amino acid
  SITE 15: note = misc_feature - Xaa can be any naturally occurring amino acid
XXXXXCXYXXXIVLX

SEQ ID NO: 2356 - protein, 6 aa, synthetic construct
  REGION 1..6: note = epitope
YVTEIV

SEQ ID NO: 2357 - protein, 8 aa, synthetic construct
  REGION 1..8: note = epitope
HDIDRCAY

SEQ ID NO: 2358 - protein, 4 aa, synthetic construct
  REGION 1..4: note = epitope
TEIV

SEQ ID NO: 2359 - protein, 15 aa, synthetic construct
  REGION 1..15: note = epitope
  REGION 1..3: note = misc_feature - Xaa can be any naturally occurring amino acid
  SITE 7: note = misc_feature - Xaa can be any naturally occurring amino acid
  SITE 11: note = misc_feature - Xaa can be any naturally occurring amino acid
XXXDRCXYVTXIVLA

SEQ ID NO: 2360 - protein, 15 aa, synthetic construct
  REGION 1..15: note = epitope
  REGION 1..5: note = misc_feature - Xaa can be any naturally occurring amino acid
  SITE 7: note = misc_feature - Xaa can be any naturally occurring amino acid
  SITE 9: note = misc_feature - Xaa can be any naturally occurring amino acid
  SITE 11: note = misc_feature - Xaa can be any naturally occurring amino acid
XXXXXCXYXTXIVLA

SEQ ID NO: 2361 - protein, 15 aa, synthetic construct
  REGION 1..15: note = epitope
  REGION 1..7: note = misc_feature - Xaa can be any naturally occurring amino acid
  REGION 9..11: note = misc_feature - Xaa can be any naturally occurring amino acid
  SITE 15: note = misc_feature - Xaa can be any naturally occurring amino acid
XXXXXXXYXXXIVLX

SEQ ID NO: 2362 - protein, 5 aa, synthetic construct
  REGION 1..5: note = epitope
VTEIV

SEQ ID NO: 2363 - protein, 15 aa, synthetic construct
  REGION 1..15: note = epitope
  REGION 1..7: note = misc_feature - Xaa can be any naturally occurring amino acid
  REGION 9..12: note = misc_feature - Xaa can be any naturally occurring amino acid
XXXXXXXYXXXXVLA

SEQ ID NO: 2364 - protein, 15 aa, synthetic construct
  REGION 1..15: note = epitope
  REGION 1..5: note = misc_feature - Xaa can be any naturally occurring amino acid
  SITE 11: note = misc_feature - Xaa can be any naturally occurring amino acid
XXXXXCAYVTXIVLA

SEQ ID NO: 2365 - protein, 15 aa, synthetic construct
  REGION 1..15: note = epitope
  REGION 1..5: note = misc_feature - Xaa can be any naturally occurring amino acid
  SITE 7: note = misc_feature - Xaa can be any naturally occurring amino acid
  REGION 10..11: note = misc_feature - Xaa can be any naturally occurring amino acid
XXXXXCXYVXXIVLA

SEQ ID NO: 2366 - protein, 15 aa, synthetic construct
  REGION 1..15: note = epitope
  REGION 1..7: note = misc_feature - Xaa can be any naturally occurring amino acid
  REGION 9..11: note = misc_feature - Xaa can be any naturally occurring amino acid
  SITE 15: note = misc_feature - Xaa can be any naturally occurring amino acid
XXXXXXXYXXXIVLX

SEQ ID NO: 2367 - protein, 5 aa, synthetic construct
  REGION 1..5: note = epitope
VTEIV

SEQ ID NO: 2368 - protein, 5 aa, synthetic construct
  REGION 1..5: note = epitope
  SITE 3: note = misc_feature - Xaa can be any naturally occurring amino acid
VTXIV

SEQ ID NO: 2369 - protein, 15 aa, synthetic construct
  REGION 1..15: note = epitope
  REGION 1..5: note = misc_feature - Xaa can be any naturally occurring amino acid
  SITE 7: note = misc_feature - Xaa can be any naturally occurring amino acid
  SITE 9: note = misc_feature - Xaa can be any naturally occurring amino acid
  SITE 11: note = misc_feature - Xaa can be any naturally occurring amino acid
XXXXXCXYXTXIVLA

SEQ ID NO: 2370 - protein, 15 aa, synthetic construct
  REGION 1..15: note = epitope
  REGION 1..7: note = misc_feature - Xaa can be any naturally occurring amino acid
  SITE 9: note = misc_feature - Xaa can be any naturally occurring amino acid
  SITE 11: note = misc_feature - Xaa can be any naturally occurring amino acid
  SITE 15: note = misc_feature - Xaa can be any naturally occurring amino acid
XXXXXXXYXTXIVLX

SEQ ID NO: 2371 - protein, 8 aa, synthetic construct
  REGION 1..8: note = epitope
HDIDRCAY

SEQ ID NO: 2372 - protein, 5 aa, synthetic construct
  REGION 1..5: note = epitope
TEIVL

SEQ ID NO: 2373 - protein, 4 aa, synthetic construct
  REGION 1..4: note = epitope
TEIV

SEQ ID NO: 2374 - protein, 15 aa, synthetic construct
  REGION 1..15: note = epitope
  REGION 1..3: note = misc_feature - Xaa can be any naturally occurring amino acid
  SITE 9: note = misc_feature - Xaa can be any naturally occurring amino acid
  SITE 11: note = misc_feature - Xaa can be any naturally occurring amino acid
XXXDRCAYXTXIVLA

SEQ ID NO: 2375 - protein, 15 aa, synthetic construct
  REGION 1..15: note = epitope
  REGION 1..5: note = misc_feature - Xaa can be any naturally occurring amino acid
  SITE 7: note = misc_feature - Xaa can be any naturally occurring amino acid
  REGION 9..11: note = misc_feature - Xaa can be any naturally occurring amino acid
XXXXXCXYXXXIVLA

SEQ ID NO: 2376 - protein, 7 aa, synthetic construct
  REGION 1..7: note = epitope
AYVTEIV

SEQ ID NO: 2377 - protein, 6 aa, synthetic construct
  REGION 1..6: note = epitope
YVTEIV

SEQ ID NO: 2378 - protein, 15 aa, synthetic construct
  REGION 1..15: note = epitope
  REGION 1..5: note = misc_feature - Xaa can be any naturally occurring amino acid
  REGION 9..11: note = misc_feature - Xaa can be any naturally occurring amino acid
  SITE 15: note = misc_feature - Xaa can be any naturally occurring amino acid
XXXXXCAYXXXIVLX

SEQ ID NO: 2379 - protein, 8 aa, synthetic construct
  REGION 1..8: note = epitope
HDIDRCAY

SEQ ID NO: 2380 - protein, 10 aa, synthetic construct
  REGION 1..10: note = epitope
DRCAYVTEIV

SEQ ID NO: 2381 - protein, 15 aa, synthetic construct
  REGION 1..15: note = epitope
  REGION 1..5: note = misc_feature - Xaa can be any naturally occurring amino acid
  SITE 7: note = misc_feature - Xaa can be any naturally occurring amino acid
  SITE 9: note = misc_feature - Xaa can be any naturally occurring amino acid
  SITE 11: note = misc_feature - Xaa can be any naturally occurring amino acid
XXXXXCXYXTXIVLA

SEQ ID NO: 2382 - protein, 15 aa, synthetic construct
  REGION 1..15: note = epitope
  REGION 1..7: note = misc_feature - Xaa can be any naturally occurring amino acid
  REGION 9..11: note = misc_feature - Xaa can be any naturally occurring amino acid
  SITE 15: note = misc_feature - Xaa can be any naturally occurring amino acid
XXXXXXXYXXXIVLX

SEQ ID NO: 2383 - protein, 8 aa, synthetic construct
  REGION 1..8: note = epitope
HDIDRCAY

SEQ ID NO: 2384 - protein, 7 aa, synthetic construct
  REGION 1..7: note = epitope
YVTEIVL

SEQ ID NO: 2385 - protein, 4 aa, synthetic construct
  REGION 1..4: note = epitope
VTEI

SEQ ID NO: 2386 - protein, 15 aa, synthetic construct
  REGION 1..15: note = epitope
  REGION 2..5: note = misc_feature - Xaa can be any naturally occurring amino acid
  SITE 7: note = misc_feature - Xaa can be any naturally occurring amino acid
  REGION 9..11: note = misc_feature - Xaa can be any naturally occurring amino acid
HXXXXCXYXXXIVLA

SEQ ID NO: 2387 - protein, 15 aa, synthetic construct
  REGION 1..15: note = epitope
  REGION 1..7: note = misc_feature - Xaa can be any naturally occurring amino acid
  REGION 9..11: note = misc_feature - Xaa can be any naturally occurring amino acid
XXXXXXXYXXXIVLA

SEQ ID NO: 2388 - protein, 9 aa, synthetic construct
  REGION 1..9: note = epitope
RCAYVTEIV

SEQ ID NO: 2389 - protein, 15 aa, synthetic construct
  REGION 1..15: note = epitope
  REGION 1..4: note = misc_feature - Xaa can be any naturally occurring amino acid
  SITE 7: note = misc_feature - Xaa can be any naturally occurring amino acid
  SITE 11: note = misc_feature - Xaa can be any naturally occurring amino acid
XXXXRCXYVTXIVLA

SEQ ID NO: 2390 - protein, 5 aa, synthetic construct
  REGION 1..5: note = epitope
VTEIV

SEQ ID NO: 2391 - protein, 15 aa, synthetic construct
  REGION 1..15: note = epitope
  SITE 1: note = misc_feature - Xaa can be any naturally occurring amino acid
  SITE 11: note = misc_feature - Xaa can be any naturally occurring amino acid
XDIDRCAYVTXIVLA

SEQ ID NO: 2392 - protein, 15 aa, synthetic construct
  REGION 1..15: note = epitope
  REGION 1..4: note = misc_feature - Xaa can be any naturally occurring amino acid
  SITE 7: note = misc_feature - Xaa can be any naturally occurring amino acid
  REGION 9..12: note = misc_feature - Xaa can be any naturally occurring amino acid
XXXXRCXYXXXXVLA

SEQ ID NO: 2393 - protein, 10 aa, synthetic construct
  REGION 1..10: note = epitope
PHDIDRCAYV

SEQ ID NO: 2394 - protein, 9 aa, synthetic construct
  REGION 1..9: note = epitope
HDIDRCAYV

SEQ ID NO: 2395 - protein, 4 aa, synthetic construct
  REGION 1..4: note = epitope
TEIV

SEQ ID NO: 2396 - protein, 15 aa, synthetic construct
  REGION 1..15: note = epitope
  SITE 1: note = misc_feature - Xaa can be any naturally occurring amino acid
  REGION 3..5: note = misc_feature - Xaa can be any naturally occurring amino acid
  SITE 7: note = misc_feature - Xaa can be any naturally occurring amino acid
  REGION 9..11: note = misc_feature - Xaa can be any naturally occurring amino acid
XDXXXCXYXXXIVLA

SEQ ID NO: 2397 - protein, 15 aa, synthetic construct
  REGION 1..15: note = epitope
  REGION 1..5: note = misc_feature - Xaa can be any naturally occurring amino acid
  SITE 7: note = misc_feature - Xaa can be any naturally occurring amino acid
  REGION 9..12: note = misc_feature - Xaa can be any naturally occurring amino acid
  SITE 15: note = misc_feature - Xaa can be any naturally occurring amino acid
XXXXXCXYXXXXVLX

SEQ ID NO: 2398 - protein, 5 aa, synthetic construct
  REGION 1..5: note = epitope
TEIVL

SEQ ID NO: 2399 - protein, 4 aa, synthetic construct
  REGION 1..4: note = epitope
TEIV

SEQ ID NO: 2400 - protein, 15 aa, synthetic construct
  REGION 1..15: note = epitope
  REGION 1..3: note = misc_feature - Xaa can be any naturally occurring amino acid
  SITE 5: note = misc_feature - Xaa can be any naturally occurring amino acid
  SITE 7: note = misc_feature - Xaa can be any naturally occurring amino acid
  SITE 9: note = misc_feature - Xaa can be any naturally occurring amino acid
  SITE 11: note = misc_feature - Xaa can be any naturally occurring amino acid
XXXDXCXYXTXIVLA

SEQ ID NO: 2401 - protein, 5 aa, synthetic construct
  REGION 1..5: note = epitope
VTEIV

SEQ ID NO: 2402 - protein, 4 aa, synthetic construct
  REGION 1..4: note = epitope
TEIV

SEQ ID NO: 2403 - protein, 15 aa, synthetic construct
  REGION 1..15: note = epitope
  SITE 1: note = misc_feature - Xaa can be any naturally occurring amino acid
  SITE 4: note = misc_feature - Xaa can be any naturally occurring amino acid
  SITE 9: note = misc_feature - Xaa can be any naturally occurring amino acid
  SITE 11: note = misc_feature - Xaa can be any naturally occurring amino acid
XDIXRCAYXTXIVLA

SEQ ID NO: 2404 - protein, 15 aa, synthetic construct
  REGION 1..15: note = epitope
  SITE 1: note = misc_feature - Xaa can be any naturally occurring amino acid
  REGION 3..7: note = misc_feature - Xaa can be any naturally occurring amino acid
  REGION 9..11: note = misc_feature - Xaa can be any naturally occurring amino acid
XDXXXXXYXXXIVLA

SEQ ID NO: 2405 - protein, 10 aa, synthetic construct
  REGION 1..10: note = epitope
RCAYVTEIVL

SEQ ID NO: 2406 - protein, 5 aa, synthetic construct
  REGION 1..5: note = epitope
TEIVL

SEQ ID NO: 2407 - protein, 5 aa, synthetic construct
  REGION 1..5: note = epitope
  SITE 2: note = misc_feature - Xaa can be any naturally occurring amino acid
TXIVL

SEQ ID NO: 2408 - protein, 15 aa, synthetic construct
  REGION 1..15: note = epitope
  SITE 11: note = misc_feature - Xaa can be any naturally occurring amino acid
HDIDRCAYVTXIVLA

SEQ ID NO: 2409 - protein, 15 aa, synthetic construct
  REGION 1..15: note = epitope
  SITE 1: note = misc_feature - Xaa can be any naturally occurring amino acid
  REGION 9..11: note = misc_feature - Xaa can be any naturally occurring amino acid
XDIDRCAYXXXIVLA

SEQ ID NO: 2410 - protein, 15 aa, synthetic construct
  REGION 1..15: note = epitope
  SITE 1: note = misc_feature - Xaa can be any naturally occurring amino acid
  SITE 4: note = misc_feature - Xaa can be any naturally occurring amino acid
  SITE 7: note = misc_feature - Xaa can be any naturally occurring amino acid
  REGION 9..11: note = misc_feature - Xaa can be any naturally occurring amino acid
  SITE 15: note = misc_feature - Xaa can be any naturally occurring amino acid
XDIXRCXYXXXIVLX

SEQ ID NO: 2411 - protein, 5 aa, synthetic construct
  REGION 1..5: note = epitope
TEIVL

SEQ ID NO: 2412 - protein, 5 aa, synthetic construct
  REGION 1..5: note = epitope
  SITE 2: note = misc_feature - Xaa can be any naturally occurring amino acid
TXIVL

SEQ ID NO: 2413 - protein, 15 aa, synthetic construct
  REGION 1..15: note = epitope
  REGION 1..2: note = misc_feature - Xaa can be any naturally occurring amino acid
  REGION 4..5: note = misc_feature - Xaa can be any naturally occurring amino acid
  SITE 7: note = misc_feature - Xaa can be any naturally occurring amino acid
  REGION 10..11: note = misc_feature - Xaa can be any naturally occurring amino acid
  SITE 15: note = misc_feature - Xaa can be any naturally occurring amino acid
XXIXXCXYVXXIVLX

SEQ ID NO: 2414 - protein, 15 aa, synthetic construct
  REGION 1..15: note = epitope
  REGION 1..2: note = misc_feature - Xaa can be any naturally occurring amino acid
  REGION 4..7: note = misc_feature - Xaa can be any naturally occurring amino acid
  REGION 9..12: note = misc_feature - Xaa can be any naturally occurring amino acid
  SITE 15: note = misc_feature - Xaa can be any naturally occurring amino acid
XXIXXXXYXXXXVLX

SEQ ID NO: 2415 - protein, 7 aa, synthetic construct
  REGION 1..7: note = epitope
IDRCAYV

SEQ ID NO: 2416 - protein, 7 aa, synthetic construct
  REGION 1..7: note = epitope
  REGION 2..3: note = misc_feature - Xaa can be any naturally occurring amino acid
  SITE 5: note = misc_feature - Xaa can be any naturally occurring amino acid
IXXCXYV

SEQ ID NO: 2417 - protein, 10 aa, synthetic construct
  REGION 1..10: note = epitope
RCAYVTEIVL

SEQ ID NO: 2418 - protein, 5 aa, synthetic construct
  REGION 1..5: note = epitope
TEIVL

SEQ ID NO: 2419 - protein, 15 aa, synthetic construct
  REGION 1..15: note = epitope
QSTLKAWSGKTENEE

SEQ ID NO: 2420 - protein, 15 aa, synthetic construct
  REGION 1..15: note = epitope
  REGION 1..2: note = misc_feature - Xaa can be any naturally occurring amino acid
  SITE 4: note = misc_feature - Xaa can be any naturally occurring amino acid
  SITE 6: note = misc_feature - Xaa can be any naturally occurring amino acid
  REGION 12..13: note = misc_feature - Xaa can be any naturally occurring amino acid
  SITE 15: note = misc_feature - Xaa can be any naturally occurring amino acid
XXTXKXWSGKTXXEX

SEQ ID NO: 2421 - protein, 15 aa, synthetic construct
  REGION 1..15: note = epitope
  REGION 1..4: note = misc_feature - Xaa can be any naturally occurring amino acid
  SITE 6: note = misc_feature - Xaa can be any naturally occurring amino acid
  SITE 8: note = misc_feature - Xaa can be any naturally occurring amino acid
  REGION 12..13: note = misc_feature - Xaa can be any naturally occurring amino acid
  SITE 15: note = misc_feature - Xaa can be any naturally occurring amino acid
XXXXKXWXGKTXXEX

SEQ ID NO: 2422 - protein, 15 aa, synthetic construct
  REGION 1..15: note = epitope
  REGION 1..6: note = misc_feature - Xaa can be any naturally occurring amino acid
  SITE 8: note = misc_feature - Xaa can be any naturally occurring amino acid
  REGION 12..13: note = misc_feature - Xaa can be any naturally occurring amino acid
  SITE 15: note = misc_feature - Xaa can be any naturally occurring amino acid
XXXXXXWXGKTXXEX

SEQ ID NO: 2423 - protein, 8 aa, synthetic construct
  REGION 1..8: note = epitope
AWSGKTEN

SEQ ID NO: 2424 - protein, 5 aa, synthetic construct
  REGION 1..5: note = epitope
AWSGK

SEQ ID NO: 2425 - protein, 5 aa, synthetic construct
  REGION 1..5: note = epitope
  SITE 1: note = misc_feature - Xaa can be any naturally occurring amino acid
XWSGK

SEQ ID NO: 2426 - protein, 15 aa, synthetic construct
  REGION 1..15: note = epitope
  SITE 6: note = misc_feature - Xaa can be any naturally occurring amino acid
  REGION 12..15: note = misc_feature - Xaa can be any naturally occurring amino acid
QSTLKXWSGKTXXXX

SEQ ID NO: 2427 - protein, 15 aa, synthetic construct
  REGION 1..15: note = epitope
  REGION 1..2: note = misc_feature - Xaa can be any naturally occurring amino acid
  SITE 6: note = misc_feature - Xaa can be any naturally occurring amino acid
  SITE 8: note = misc_feature - Xaa can be any naturally occurring amino acid
  REGION 12..15: note = misc_feature - Xaa can be any naturally occurring amino acid
XXTLKXWXGKTXXXX

SEQ ID NO: 2428 - protein, 15 aa, synthetic construct
  REGION 1..15: note = epitope
  SITE 4: note = misc_feature - Xaa can be any naturally occurring amino acid
  SITE 6: note = misc_feature - Xaa can be any naturally occurring amino acid
  SITE 8: note = misc_feature - Xaa can be any naturally occurring amino acid
  REGION 12..15: note = misc_feature - Xaa can be any naturally occurring amino acid
QSTXKXWXGKTXXXX

SEQ ID NO: 2429 - protein, 15 aa, synthetic construct
  REGION 1..15: note = epitope
  REGION 1..2: note = misc_feature - Xaa can be any naturally occurring amino acid
  SITE 4: note = misc_feature - Xaa can be any naturally occurring amino acid
  REGION 6..9: note = misc_feature - Xaa can be any naturally occurring amino acid
  REGION 12..15: note = misc_feature - Xaa can be any naturally occurring amino acid
XXTXKXXXXKTXXXX

SEQ ID NO: 2430 - protein, 15 aa, synthetic construct
  REGION 1..15: note = epitope
  REGION 8..9: note = misc_feature - Xaa can be any naturally occurring amino acid
  SITE 12: note = misc_feature - Xaa can be any naturally occurring amino acid
  SITE 15: note = misc_feature - Xaa can be any naturally occurring amino acid
QSTLKAWXXKTXNEX

SEQ ID NO: 2431 - protein, 15 aa, synthetic construct
  REGION 1..15: note = epitope
  REGION 1..3: note = misc_feature - Xaa can be any naturally occurring amino acid
  REGION 8..9: note = misc_feature - Xaa can be any naturally occurring amino acid
  REGION 12..15: note = misc_feature - Xaa can be any naturally occurring amino acid
XXXLKAWXXKTXXXX

SEQ ID NO: 2432 - protein, 10 aa, synthetic construct
  REGION 1..10: note = epitope
QSTLKAWSGK

SEQ ID NO: 2433 - protein, 10 aa, synthetic construct
  REGION 1..10: note = epitope
  REGION 8..9: note = misc_feature - Xaa can be any naturally occurring amino acid
QSTLKAWXXK

SEQ ID NO: 2434 - protein, 10 aa, synthetic construct
  REGION 1..10: note = epitope
  REGION 1..3: note = misc_feature - Xaa can be any naturally occurring amino acid
  REGION 8..9: note = misc_feature - Xaa can be any naturally occurring amino acid
XXXLKAWXXK

SEQ ID NO: 2435 - protein, 9 aa, synthetic construct
  REGION 1..9: note = epitope
KAWSGKTEN

SEQ ID NO: 2436 - protein, 6 aa, synthetic construct
  REGION 1..6: note = epitope
WSGKTE

SEQ ID NO: 2437 - protein, 15 aa, synthetic construct
  REGION 1..15: note = epitope
  SITE 4: note = misc_feature - Xaa can be any naturally occurring amino acid
  REGION 12..15: note = misc_feature - Xaa can be any naturally occurring amino acid
QSTXKAWSGKTXXXX

SEQ ID NO: 2438 - protein, 15 aa, synthetic construct
  REGION 1..15: note = epitope
  REGION 1..3: note = misc_feature - Xaa can be any naturally occurring amino acid
  REGION 12..15: note = misc_feature - Xaa can be any naturally occurring amino acid
XXXLKAWSGKTXXXX

SEQ ID NO: 2439 - protein, 15 aa, synthetic construct
  REGION 1..15: note = epitope
  REGION 1..4: note = misc_feature - Xaa can be any naturally occurring amino acid
  REGION 12..15: note = misc_feature - Xaa can be any naturally occurring amino acid
XXXXKAWSGKTXXXX

SEQ ID NO: 2440 - protein, 15 aa, synthetic construct
  REGION 1..15: note = epitope
  REGION 1..5: note = misc_feature - Xaa can be any naturally occurring amino acid
  REGION 8..9: note = misc_feature - Xaa can be any naturally occurring amino acid
  REGION 12..15: note = misc_feature - Xaa can be any naturally occurring amino acid
XXXXXAWXXKTXXXX

SEQ ID NO: 2441 - protein, 6 aa, synthetic construct
  REGION 1..6: note = epitope
KAWSGK

SEQ ID NO: 2442 - protein, 15 aa, synthetic construct
  REGION 1..15: note = epitope
  REGION 1..4: note = misc_feature - Xaa can be any naturally occurring amino acid
  SITE 6: note = misc_feature - Xaa can be any naturally occurring amino acid
  REGION 12..15: note = misc_feature - Xaa can be any naturally occurring amino acid
XXXXKXWSGKTXXXX

SEQ ID NO: 2443 - protein, 15 aa, synthetic construct
  REGION 1..15: note = epitope
  SITE 1: note = misc_feature - Xaa can be any naturally occurring amino acid
  REGION 12..15: note = misc_feature - Xaa can be any naturally occurring amino acid
XSTLKAWSGKTXXXX

SEQ ID NO: 2444 - protein, 15 aa, synthetic construct
  REGION 1..15: note = epitope
  REGION 1..4: note = misc_feature - Xaa can be any naturally occurring amino acid
  REGION 12..15: note = misc_feature - Xaa can be any naturally occurring amino acid
XXXXKAWSGKTXXXX

SEQ ID NO: 2445 - protein, 15 aa, synthetic construct
  REGION 1..15: note = epitope
  REGION 1..6: note = misc_feature - Xaa can be any naturally occurring amino acid
  REGION 12..15: note = misc_feature - Xaa can be any naturally occurring amino acid
XXXXXXWSGKTXXXX

SEQ ID NO: 2446 - protein, 15 aa, synthetic construct
  REGION 1..15: note = epitope
  SITE 1: note = misc_feature - Xaa can be any naturally occurring amino acid
  REGION 8..9: note = misc_feature - Xaa can be any naturally occurring amino acid
  REGION 12..15: note = misc_feature - Xaa can be any naturally occurring amino acid
XSTLKAWXXKTXXXX

SEQ ID NO: 2447 - protein, 15 aa, synthetic construct
  REGION 1..15: note = epitope
  REGION 1..4: note = misc_feature - Xaa can be any naturally occurring amino acid
  SITE 6: note = misc_feature - Xaa can be any naturally occurring amino acid
  REGION 8..9: note = misc_feature - Xaa can be any naturally occurring amino acid
  REGION 12..15: note = misc_feature - Xaa can be any naturally occurring amino acid
XXXXKXWXXKTXXXX

SEQ ID NO: 2448 - protein, 15 aa, synthetic construct
  REGION 1..15: note = epitope
  REGION 12..15: note = misc_feature - Xaa can be any naturally occurring amino acid
QSTLKAWSGKTXXXX

SEQ ID NO: 2449 - protein, 15 aa, synthetic construct
  REGION 1..15: note = epitope
  SITE 1: note = misc_feature - Xaa can be any naturally occurring amino acid
  SITE 3: note = misc_feature - Xaa can be any naturally occurring amino acid
  REGION 12..15: note = misc_feature - Xaa can be any naturally occurring amino acid
XSXLKAWSGKTXXXX

SEQ ID NO: 2450 - protein, 15 aa, synthetic construct
  REGION 1..15: note = epitope
  REGION 1..3: note = misc_feature - Xaa can be any naturally occurring amino acid
  SITE 8: note = misc_feature - Xaa can be any naturally occurring amino acid
  REGION 12..15: note = misc_feature - Xaa can be any naturally occurring amino acid
XXXLKAWXGKTXXXX

SEQ ID NO: 2451 - protein, 15 aa, synthetic construct
  REGION 1..15: note = epitope
  SITE 1: note = misc_feature - Xaa can be any naturally occurring amino acid
  SITE 3: note = misc_feature - Xaa can be any naturally occurring amino acid
  SITE 9: note = misc_feature - Xaa can be any naturally occurring amino acid
  SITE 15: note = misc_feature - Xaa can be any naturally occurring amino acid
XSXLKAWSXKTENEX

SEQ ID NO: 2452 - protein, 15 aa, synthetic construct
  REGION 1..15: note = epitope
  REGION 1..4: note = misc_feature - Xaa can be any naturally occurring amino acid
  SITE 6: note = misc_feature - Xaa can be any naturally occurring amino acid
  REGION 8..9: note = misc_feature - Xaa can be any naturally occurring amino acid
  SITE 12: note = misc_feature - Xaa can be any naturally occurring amino acid
  REGION 14..15: note = misc_feature - Xaa can be any naturally occurring amino acid
XXXXKXWXXKTXNXX

SEQ ID NO: 2453 - protein, 7 aa, synthetic construct
  REGION 1..7: note = epitope
LKAWSGK

SEQ ID NO: 2454 - protein, 7 aa, synthetic construct
  REGION 1..7: note = epitope
  SITE 6: note = misc_feature - Xaa can be any naturally occurring amino acid
LKAWSXK

SEQ ID NO: 2455 - protein, 15 aa, synthetic construct
  REGION 1..15: note = epitope
  REGION 12..15: note = misc_feature - Xaa can be any naturally occurring amino acid
QSTLKAWSGKTXXXX

SEQ ID NO: 2456 - protein, 15 aa, synthetic construct
  REGION 1..15: note = epitope
  SITE 6: note = misc_feature - Xaa can be any naturally occurring amino acid
  REGION 12..15: note = misc_feature - Xaa can be any naturally occurring amino acid
QSTLKXWSGKTXXXX

SEQ ID NO: 2457 - protein, 15 aa, synthetic construct
  REGION 1..15: note = epitope
  REGION 1..3: note = misc_feature - Xaa can be any naturally occurring amino acid
  SITE 8: note = misc_feature - Xaa can be any naturally occurring amino acid
  SITE 12: note = misc_feature - Xaa can be any naturally occurring amino acid
  SITE 14: note = misc_feature - Xaa can be any naturally occurring amino acid
XXXLKAWXGKTXNXE

SEQ ID NO: 2458 - protein, 15 aa, synthetic construct
  REGION 1..15: note = epitope
  REGION 1..3: note = misc_feature - Xaa can be any naturally occurring amino acid
  REGION 8..9: note = misc_feature - Xaa can be any naturally occurring amino acid
  SITE 12: note = misc_feature - Xaa can be any naturally occurring amino acid
  REGION 14..15: note = misc_feature - Xaa can be any naturally occurring amino acid
XXXLKAWXXKTXNXX

SEQ ID NO: 2459 - protein, 15 aa, synthetic construct
  REGION 1..15: note = epitope
  REGION 1..3: note = misc_feature - Xaa can be any naturally occurring amino acid
  REGION 8..9: note = misc_feature - Xaa can be any naturally occurring amino acid
  REGION 12..15: note = misc_feature - Xaa can be any naturally occurring amino acid
XXXLKAWXXKTXXXX

SEQ ID NO: 2460 - protein, 7 aa, synthetic construct
  REGION 1..7: note = epitope
LKAWSGK

SEQ ID NO: 2461 - protein, 6 aa, synthetic construct
  REGION 1..6: note = epitope
LKAWSG

SEQ ID NO: 2462 - protein, 6 aa, synthetic construct
  REGION 1..6: note = epitope
  SITE 5: note = misc_feature - Xaa can be any naturally occurring amino acid
LKAWXG

SEQ ID NO: 2463 - protein, 6 aa, synthetic construct
  REGION 1..6: note = epitope
  REGION 5..6: note = misc_feature - Xaa can be any naturally occurring amino acid
LKAWXX

SEQ ID NO: 2464 - protein, 9 aa, synthetic construct
  REGION 1..9: note = epitope
WSGKTENEE

SEQ ID NO: 2465 - protein, 9 aa, synthetic construct
  REGION 1..9: note = epitope
  SITE 2: note = misc_feature - Xaa can be any naturally occurring amino acid
  SITE 6: note = misc_feature - Xaa can be any naturally occurring amino acid
  SITE 8: note = misc_feature - Xaa can be any naturally occurring amino acid
WXGKTXNXE

SEQ ID NO: 2466 - protein, 9 aa, synthetic construct
  REGION 1..9: note = epitope
  REGION 2..3: note = misc_feature - Xaa can be any naturally occurring amino acid
  SITE 6: note = misc_feature - Xaa can be any naturally occurring amino acid
  REGION 8..9: note = misc_feature - Xaa can be any naturally occurring amino acid
WXXKTXNXX

SEQ ID NO: 2467 - protein, 15 aa, synthetic construct
  REGION 1..15: note = epitope
  SITE 6: note = misc_feature - Xaa can be any naturally occurring amino acid
  SITE 13: note = misc_feature - Xaa can be any naturally occurring amino acid
QSTLKXWSGKTEXEE

SEQ ID NO: 2468 - protein, 15 aa, synthetic construct
  REGION 1..15: note = epitope
  SITE 1: note = misc_feature - Xaa can be any naturally occurring amino acid
  REGION 5..6: note = misc_feature - Xaa can be any naturally occurring amino acid
  REGION 8..9: note = misc_feature - Xaa can be any naturally occurring amino acid
  SITE 13: note = misc_feature - Xaa can be any naturally occurring amino acid
  SITE 15: note = misc_feature - Xaa can be any naturally occurring amino acid
XSTLXXWXXKTEXEX

SEQ ID NO: 2469 - protein, 15 aa, synthetic construct
  REGION 1..15: note = epitope
  SITE 1: note = misc_feature - Xaa can be any naturally occurring amino acid
  SITE 3: note = misc_feature - Xaa can be any naturally occurring amino acid
  REGION 5..6: note = misc_feature - Xaa can be any naturally occurring amino acid
  REGION 8..9: note = misc_feature - Xaa can be any naturally occurring amino acid
  REGION 13..15: note = misc_feature - Xaa can be any naturally occurring amino acid
XSXLXXWXXKTEXXX

SEQ ID NO: 2470 - protein, 7 aa, synthetic construct
  REGION 1..7: note = epitope
LKAWSGK

SEQ ID NO: 2471 - protein, 7 aa, synthetic construct
  REGION 1..7: note = epitope
  SITE 3: note = misc_feature - Xaa can be any naturally occurring amino acid
LKXWSGK

SEQ ID NO: 2472 - protein, 8 aa, synthetic construct
  REGION 1..8: note = epitope
SGKTENEE

SEQ ID NO: 2473 - protein, 8 aa, synthetic construct
  REGION 1..8: note = epitope
  SITE 6: note = misc_feature - Xaa can be any naturally occurring amino acid
SGKTEXEE

SEQ ID NO: 2474 - protein, 8 aa, synthetic construct
  REGION 1..8: note = epitope
  REGION 1..2: note = misc_feature - Xaa can be any naturally occurring amino acid
  SITE 6: note = misc_feature - Xaa can be any naturally occurring amino acid
  SITE 8: note = misc_feature - Xaa can be any naturally occurring amino acid
XXKTEXEX

SEQ ID NO: 2475 - protein, 15 aa, synthetic construct
  REGION 1..15: note = epitope
  SITE 1: note = misc_feature - Xaa can be any naturally occurring amino acid
  REGION 12..15: note = misc_feature - Xaa can be any naturally occurring amino acid
XSTLKAWSGKTXXXX

SEQ ID NO: 2476 - protein, 15 aa, synthetic construct
  REGION 1..15: note = epitope
  REGION 1..4: note = misc_feature - Xaa can be any naturally occurring amino acid
  REGION 8..9: note = misc_feature - Xaa can be any naturally occurring amino acid
  REGION 12..15: note = misc_feature - Xaa can be any naturally occurring amino acid
XXXXKAWXXKTXXXX

SEQ ID NO: 2477 - protein, 15 aa, synthetic construct
  REGION 1..15: note = epitope
  SITE 1: note = misc_feature - Xaa can be any naturally occurring amino acid
  REGION 4..5: note = misc_feature - Xaa can be any naturally occurring amino acid
  SITE 9: note = misc_feature - Xaa can be any naturally occurring amino acid
  SITE 15: note = misc_feature - Xaa can be any naturally occurring amino acid
XSTXXAWSXKTENEX

SEQ ID NO: 2478 - protein, 15 aa, synthetic construct
  REGION 1..15: note = epitope
  SITE 1: note = misc_feature - Xaa can be any naturally occurring amino acid
  REGION 3..5: note = misc_feature - Xaa can be any naturally occurring amino acid
  SITE 9: note = misc_feature - Xaa can be any naturally occurring amino acid
  SITE 15: note = misc_feature - Xaa can be any naturally occurring amino acid
XSXXXAWSXKTENEX

SEQ ID NO: 2479 - protein, 15 aa, synthetic construct
  REGION 1..15: note = epitope
  REGION 1..5: note = misc_feature - Xaa can be any naturally occurring amino acid
  SITE 9: note = misc_feature - Xaa can be any naturally occurring amino acid
  SITE 12: note = misc_feature - Xaa can be any naturally occurring amino acid
  REGION 14..15: note = misc_feature - Xaa can be any naturally occurring amino acid
XXXXXAWSXKTXNXX

SEQ ID NO: 2480 - protein, 5 aa, synthetic construct
  REGION 1..5: note = epitope
KAWSG

SEQ ID NO: 2481 - protein, 15 aa, synthetic construct
  REGION 1..15: note = epitope
  REGION 12..15: note = misc_feature - Xaa can be any naturally occurring amino acid
QSTLKAWSGKTXXXX

SEQ ID NO: 2482 - protein, 15 aa, synthetic construct
  REGION 1..15: note = epitope
  REGION 1..3: note = misc_feature - Xaa can be any naturally occurring amino acid
  REGION 12..15: note = misc_feature - Xaa can be any naturally occurring amino acid
XXXLKAWSGKTXXXX

SEQ ID NO: 2483 - protein, 15 aa, synthetic construct
  REGION 1..15: note = epitope
  REGION 1..4: note = misc_feature - Xaa can be any naturally occurring amino acid
  REGION 12..15: note = misc_feature - Xaa can be any naturally occurring amino acid
XXXXKAWSGKTXXXX

SEQ ID NO: 2484 - protein, 15 aa, synthetic construct
  REGION 1..15: note = epitope
  REGION 2..3: note = misc_feature - Xaa can be any naturally occurring amino acid
  REGION 5..7: note = misc_feature - Xaa can be any naturally occurring amino acid
  REGION 12..15: note = misc_feature - Xaa can be any naturally occurring amino acid
QXXLXXXSGKTXXXX

SEQ ID NO: 2485 - protein, 15 aa, synthetic construct
  REGION 1..15: note = epitope
  SITE 4: note = misc_feature - Xaa can be any naturally occurring amino acid
  SITE 6: note = misc_feature - Xaa can be any naturally occurring amino acid
  SITE 15: note = misc_feature - Xaa can be any naturally occurring amino acid
QSTXKXWSGKTENEX

SEQ ID NO: 2486 - protein, 15 aa, synthetic construct
  REGION 1..15: note = epitope
  SITE 1: note = misc_feature - Xaa can be any naturally occurring amino acid
  REGION 3..4: note = misc_feature - Xaa can be any naturally occurring amino acid
  SITE 6: note = misc_feature - Xaa can be any naturally occurring amino acid
  SITE 9: note = misc_feature - Xaa can be any naturally occurring amino acid
  REGION 14..15: note = misc_feature - Xaa can be any naturally occurring amino acid
XSXXKXWSXKTENXX

SEQ ID NO: 2487 - protein, 6 aa, synthetic construct
  REGION 1..6: note = epitope
KAWSGK

SEQ ID NO: 2488 - protein, 6 aa, synthetic construct
  REGION 1..6: note = epitope
  SITE 2: note = misc_feature - Xaa can be any naturally occurring amino acid
KXWSGK

SEQ ID NO: 2489 - protein, 6 aa, synthetic construct
  REGION 1..6: note = epitope
  SITE 2: note = misc_feature - Xaa can be any naturally occurring amino acid
  SITE 5: note = misc_feature - Xaa can be any naturally occurring amino acid
KXWSXK

SEQ ID NO: 2490 - protein, 15 aa, synthetic construct
  REGION 1..15: note = epitope
  REGION 1..3: note = misc_feature - Xaa can be any naturally occurring amino acid
  SITE 6: note = misc_feature - Xaa can be any naturally occurring amino acid
  REGION 8..9: note = misc_feature - Xaa can be any naturally occurring amino acid
  REGION 12..15: note = misc_feature - Xaa can be any naturally occurring amino acid
XXXLKXWXXKTXXXX

SEQ ID NO: 2491 - protein, 15 aa, synthetic construct
  REGION 1..15: note = epitope
SSQVSFQPSQLNPQA

SEQ ID NO: 2492 - protein, 10 aa, synthetic construct
  REGION 1..10: note = epitope
SSQVSFQPSQ

SEQ ID NO: 2493 - protein, 6 aa, synthetic construct
  REGION 1..6: note = epitope
SSQVSF

SEQ ID NO: 2494 - protein, 4 aa, synthetic construct
  REGION 1..4: note = epitope
QVSF

SEQ ID NO: 2495 - protein, 9 aa, synthetic construct
  REGION 1..9: note = epitope
FQPSQLNPQ

SEQ ID NO: 2496 - protein, 15 aa, synthetic construct
  REGION 1..15: note = epitope
  SITE 1: note = misc_feature - Xaa can be any naturally occurring amino acid
  REGION 4..5: note = misc_feature - Xaa can be any naturally occurring amino acid
  REGION 7..9: note = misc_feature - Xaa can be any naturally occurring amino acid
  REGION 11..15: note = misc_feature - Xaa can be any naturally occurring amino acid
XSQXXFXXXQXXXXX

SEQ ID NO: 2497 - protein, 4 aa, synthetic construct
  REGION 1..4: note = epitope
QVSF

SEQ ID NO: 2498 - protein, 15 aa, synthetic construct
  REGION 1..15: note = epitope
  REGION 7..15: note = misc_feature - Xaa can be any naturally occurring amino acid
SSQVSFXXXXXXXXX

SEQ ID NO: 2499 - protein, 5 aa, synthetic construct
  REGION 1..5: note = epitope
SQVSF

SEQ ID NO: 2500 - protein, 4 aa, synthetic construct
  REGION 1..4: note = epitope
QVSF

SEQ ID NO: 2501 - protein, 10 aa, synthetic construct
  REGION 1..10: note = epitope
SFQPSQLNPQ

SEQ ID NO: 2502 - protein, 10 aa, synthetic construct
  REGION 1..10: note = epitope
SSQVSFQPSQ

SEQ ID NO: 2503 - protein, 6 aa, synthetic construct
  REGION 1..6: note = epitope
SSQVSF

SEQ ID NO: 2504 - protein, 6 aa, synthetic construct
  REGION 1..6: note = epitope
SSQVSF

SEQ ID NO: 2505 - protein, 5 aa, synthetic construct
  REGION 1..5: note = epitope
SQVSF

SEQ ID NO: 2506 - protein, 10 aa, synthetic construct
  REGION 1..10: note = epitope
SSQVSFQPSQ

SEQ ID NO: 2507 - protein, 5 aa, synthetic construct
  REGION 1..5: note = epitope
SQVSF

SEQ ID NO: 2508 - protein, 5 aa, synthetic construct
  REGION 1..5: note = epitope
SQVSF

SEQ ID NO: 2509 - protein, 4 aa, synthetic construct
  REGION 1..4: note = epitope
QVSF

SEQ ID NO: 2510 - protein, 7 aa, synthetic construct
  REGION 1..7: note = epitope
PSQLNPQ

SEQ ID NO: 2511 - protein, 15 aa, synthetic construct
  REGION 1..15: note = epitope
  SITE 3: note = misc_feature - Xaa can be any naturally occurring amino acid
  REGION 6..15: note = misc_feature - Xaa can be any naturally occurring amino acid
SSXVSXXXXXXXXXX

SEQ ID NO: 2512 - protein, 5 aa, synthetic construct
  REGION 1..5: note = epitope
SQVSF

SEQ ID NO: 2513 - protein, 15 aa, synthetic construct
  REGION 1..15: note = epitope
  REGION 2..5: note = misc_feature - Xaa can be any naturally occurring amino acid
  REGION 7..8: note = misc_feature - Xaa can be any naturally occurring amino acid
  SITE 10: note = misc_feature - Xaa can be any naturally occurring amino acid
  REGION 13..14: note = misc_feature - Xaa can be any naturally occurring amino acid
SXXXXFXXSXLNXXA

SEQ ID NO: 2514 - protein, 10 aa, synthetic construct
  REGION 1..10: note = epitope
SFQPSQLNPQ

SEQ ID NO: 2515 - protein, 6 aa, synthetic construct
  REGION 1..6: note = epitope
SFQPSQ

SEQ ID NO: 2516 - protein, 6 aa, synthetic construct
  REGION 1..6: note = epitope
SSQVSF

SEQ ID NO: 2517 - protein, 10 aa, synthetic construct
  REGION 1..10: note = epitope
QVSFQPSQLN

SEQ ID NO: 2518 - protein, 7 aa, synthetic construct
  REGION 1..7: note = epitope
PSQLNPQ

SEQ ID NO: 2519 - protein, 5 aa, synthetic construct
  REGION 1..5: note = epitope
PSQLN

SEQ ID NO: 2520 - protein, 15 aa, synthetic construct
  REGION 1..15: note = epitope
  REGION 1..5: note = misc_feature - Xaa can be any naturally occurring amino acid
  SITE 8: note = misc_feature - Xaa can be any naturally occurring amino acid
XXXXXFQXSQLNPQA

SEQ ID NO: 2521 - protein, 15 aa, synthetic construct
  REGION 1..15: note = epitope
  REGION 1..5: note = misc_feature - Xaa can be any naturally occurring amino acid
  REGION 7..8: note = misc_feature - Xaa can be any naturally occurring amino acid
  REGION 10..11: note = misc_feature - Xaa can be any naturally occurring amino acid
XXXXXFXXSXXNPQA

SEQ ID NO: 2522 - protein, 15 aa, synthetic construct
  REGION 1..15: note = epitope
  REGION 1..8: note = misc_feature - Xaa can be any naturally occurring amino acid
  REGION 10..11: note = misc_feature - Xaa can be any naturally occurring amino acid
  SITE 13: note = misc_feature - Xaa can be any naturally occurring amino acid
XXXXXXXXSXXNXQA

SEQ ID NO: 2523 - protein, 8 aa, synthetic construct
  REGION 1..8: note = epitope
PSQLNPQA

SEQ ID NO: 2524 - protein, 7 aa, synthetic construct
  REGION 1..7: note = epitope
PSQLNPQ

SEQ ID NO: 2525 - protein, 7 aa, synthetic construct
  REGION 1..7: note = epitope
  SITE 1: note = misc_feature - Xaa can be any naturally occurring amino acid
XSQLNPQ

SEQ ID NO: 2526 - protein, 7 aa, synthetic construct
  REGION 1..7: note = epitope
  SITE 1: note = misc_feature - Xaa can be any naturally occurring amino acid
  REGION 3..4: note = misc_feature - Xaa can be any naturally occurring amino acid
XSXXNPQ

SEQ ID NO: 2527 - protein, 15 aa, synthetic construct
  REGION 1..15: note = epitope
  REGION 3..5: note = misc_feature - Xaa can be any naturally occurring amino acid
  REGION 8..11: note = misc_feature - Xaa can be any naturally occurring amino acid
  REGION 13..15: note = misc_feature - Xaa can be any naturally occurring amino acid
SSXXXFQXXXXNXXX

SEQ ID NO: 2528 - protein, 6 aa, synthetic construct
  REGION 1..6: note = epitope
SSQVSF

SEQ ID NO: 2529 - protein, 9 aa, synthetic construct
  REGION 1..9: note = epitope
FQPSQLNPQ

SEQ ID NO: 2530 - protein, 8 aa, synthetic construct
  REGION 1..8: note = epitope
FQPSQLNP

SEQ ID NO: 2531 - protein, 7 aa, synthetic construct
  REGION 1..7: note = epitope
FQPSQLN

SEQ ID NO: 2532 - protein, 15 aa, synthetic construct
  REGION 1..15: note = epitope
  SITE 10: note = misc_feature - Xaa can be any naturally occurring amino acid
  REGION 12..13: note = misc_feature - Xaa can be any naturally occurring amino acid
  SITE 15: note = misc_feature - Xaa can be any naturally occurring amino acid
SSQVSFQPSXLXXQX

SEQ ID NO: 2533 - protein, 15 aa, synthetic construct
  REGION 1..15: note = epitope
  SITE 1: note = misc_feature - Xaa can be any naturally occurring amino acid
  REGION 4..7: note = misc_feature - Xaa can be any naturally occurring amino acid
  SITE 10: note = misc_feature - Xaa can be any naturally occurring amino acid
  REGION 12..15: note = misc_feature - Xaa can be any naturally occurring amino acid
XSQXXXXPSXLXXXX

SEQ ID NO: 2534 - protein, 10 aa, synthetic construct
  REGION 1..10: note = epitope
SSQVSFQPSQ

SEQ ID NO: 2535 - protein, 10 aa, synthetic construct
  REGION 1..10: note = epitope
  SITE 10: note = misc_feature - Xaa can be any naturally occurring amino acid
SSQVSFQPSX

SEQ ID NO: 2536 - protein, 10 aa, synthetic construct
  REGION 1..10: note = epitope
  SITE 1: note = misc_feature - Xaa can be any naturally occurring amino acid
  REGION 4..7: note = misc_feature - Xaa can be any naturally occurring amino acid
  SITE 10: note = misc_feature - Xaa can be any naturally occurring amino acid
XSQXXXXPSX

SEQ ID NO: 2537 - protein, 10 aa, synthetic construct
  REGION 1..10: note = epitope
SFQPSQLNPQ

SEQ ID NO: 2538 - protein, 10 aa, synthetic construct
  REGION 1..10: note = epitope
  SITE 6: note = misc_feature - Xaa can be any naturally occurring amino acid
  REGION 8..9: note = misc_feature - Xaa can be any naturally occurring amino acid
SFQPSXLXXQ

SEQ ID NO: 2539 - skipped

SEQ ID NO: 2540 - protein, 15 aa, synthetic construct
  REGION 1..15: note = epitope
  REGION 1..3: note = misc_feature - Xaa can be any naturally occurring amino acid
  REGION 7..8: note = misc_feature - Xaa can be any naturally occurring amino acid
  SITE 10: note = misc_feature - Xaa can be any naturally occurring amino acid
  REGION 14..15: note = misc_feature - Xaa can be any naturally occurring amino acid
XXXVSFXXSXLNPXX

SEQ ID NO: 2541 - protein, 10 aa, synthetic construct
  REGION 1..10: note = epitope
SSQVSFQPSQ

SEQ ID NO: 2542 - protein, 6 aa, synthetic construct
  REGION 1..6: note = epitope
SSQVSF

SEQ ID NO: 2543 - protein, 9 aa, synthetic construct
  REGION 1..9: note = epitope
VSFQPSQLN

SEQ ID NO: 2544 - protein, 9 aa, synthetic construct
  REGION 1..9: note = epitope
  REGION 4..5: note = misc_feature - Xaa can be any naturally occurring amino acid
  SITE 7: note = misc_feature - Xaa can be any naturally occurring amino acid
VSFXXSXLN

SEQ ID NO: 2545 - protein, 15 aa, synthetic construct
  REGION 1..15: note = epitope
LQQSTYQLVQQLCCQ

SEQ ID NO: 2546 - protein, 10 aa, synthetic construct
  REGION 1..10: note = epitope
LQQSTYQLVQ

SEQ ID NO: 2547 - protein, 10 aa, synthetic construct
  REGION 1..10: note = epitope
QSTYQLVQQL

SEQ ID NO: 2548 - protein, 4 aa, synthetic construct
  REGION 1..4: note = epitope
QSTY

SEQ ID NO: 2549 - protein, 8 aa, synthetic construct
  REGION 1..8: note = epitope
QLVQQLCC

SEQ ID NO: 2550 - protein, 15 aa, synthetic construct
  REGION 1..15: note = epitope
  SITE 2: note = misc_feature - Xaa can be any naturally occurring amino acid
  SITE 7: note = misc_feature - Xaa can be any naturally occurring amino acid
  REGION 10..15: note = misc_feature - Xaa can be any naturally occurring amino acid
LXQSTYXLVXXXXXX

SEQ ID NO: 2551 - protein, 9 aa, synthetic construct
  REGION 1..9: note = epitope
YQLVQQLCC

SEQ ID NO: 2552 - protein, 8 aa, synthetic construct
  REGION 1..8: note = epitope
QLVQQLCC

SEQ ID NO: 2553 - protein, 4 aa, synthetic construct
  REGION 1..4: note = epitope
QLVQ

SEQ ID NO: 2554 - protein, 10 aa, synthetic construct
  REGION 1..10: note = epitope
LQQSTYQLVQ

SEQ ID NO: 2555 - protein, 10 aa, synthetic construct
  REGION 1..10: note = epitope
QSTYQLVQQL

SEQ ID NO: 2556 - protein, 8 aa, synthetic construct
  REGION 1..8: note = epitope
QLVQQLCC

SEQ ID NO: 2557 - protein, 15 aa, synthetic construct
  REGION 1..15: note = epitope
  REGION 1..4: note = misc_feature - Xaa can be any naturally occurring amino acid
  SITE 7: note = misc_feature - Xaa can be any naturally occurring amino acid
  REGION 9..11: note = misc_feature - Xaa can be any naturally occurring amino acid
  REGION 13..15: note = misc_feature - Xaa can be any naturally occurring amino acid
XXXXTYXLXXXLXXX

SEQ ID NO: 2558 - protein, 10 aa, synthetic construct
  REGION 1..10: note = epitope
QSTYQLVQQL

SEQ ID NO: 2559 - protein, 7 aa, synthetic construct
  REGION 1..7: note = epitope
LVQQLCC

SEQ ID NO: 2560 - protein, 10 aa, synthetic construct
  REGION 1..10: note = epitope
LQQSTYQLVQ

SEQ ID NO: 2561 - protein, 5 aa, synthetic construct
  REGION 1..5: note = epitope
LVQQL

SEQ ID NO: 2562 - protein, 10 aa, synthetic construct
  REGION 1..10: note = epitope
QSTYQLVQQL

SEQ ID NO: 2563 - protein, 8 aa, synthetic construct
  REGION 1..8: note = epitope
QLVQQLCC

SEQ ID NO: 2564 - protein, 5 aa, synthetic construct
  REGION 1..5: note = epitope
QLVQQ

SEQ ID NO: 2565 - protein, 8 aa, synthetic construct
  REGION 1..8: note = epitope
QSTYQLVQ

SEQ ID NO: 2566 - protein, 9 aa, synthetic construct
  REGION 1..9: note = epitope
YQLVQQLCC

SEQ ID NO: 2567 - protein, 5 aa, synthetic construct
  REGION 1..5: note = epitope
QLVQQ

SEQ ID NO: 2568 - protein, 15 aa, synthetic construct
  REGION 1..15: note = epitope
  REGION 1..3: note = misc_feature - Xaa can be any naturally occurring amino acid
  REGION 10..11: note = misc_feature - Xaa can be any naturally occurring amino acid
  SITE 13: note = misc_feature - Xaa can be any naturally occurring amino acid
  SITE 15: note = misc_feature - Xaa can be any naturally occurring amino acid
XXXSTYQLVXXLXCX

SEQ ID NO: 2569 - protein, 6 aa, synthetic construct
  REGION 1..6: note = epitope
QLVQQL

SEQ ID NO: 2570 - protein, 5 aa, synthetic construct
  REGION 1..5: note = epitope
QLVQQ

SEQ ID NO: 2571 - protein, 15 aa, synthetic construct
  REGION 1..15: note = epitope
  SITE 1: note = misc_feature - Xaa can be any naturally occurring amino acid
  REGION 10..11: note = misc_feature - Xaa can be any naturally occurring amino acid
  SITE 13: note = misc_feature - Xaa can be any naturally occurring amino acid
  SITE 15: note = misc_feature - Xaa can be any naturally occurring amino acid
XQQSTYQLVXXLXCX

SEQ ID NO: 2572 - protein, 15 aa, synthetic construct
  REGION 1..15: note = epitope
  REGION 1..3: note = misc_feature - Xaa can be any naturally occurring amino acid
  SITE 5: note = misc_feature - Xaa can be any naturally occurring amino acid
  REGION 10..15: note = misc_feature - Xaa can be any naturally occurring amino acid
XXXSXYQLVXXXXXX

SEQ ID NO: 2573 - protein, 7 aa, synthetic construct
  REGION 1..7: note = epitope
YQLVQQL

SEQ ID NO: 2574 - protein, 6 aa, synthetic construct
  REGION 1..6: note = epitope
QLVQQL

SEQ ID NO: 2575 - protein, 4 aa, synthetic construct
  REGION 1..4: note = epitope
QLVQ

SEQ ID NO: 2576 - protein, 15 aa, synthetic construct
  REGION 1..15: note = epitope
  REGION 1..3: note = misc_feature - Xaa can be any naturally occurring amino acid
  REGION 9..13: note = misc_feature - Xaa can be any naturally occurring amino acid
  SITE 15: note = misc_feature - Xaa can be any naturally occurring amino acid
XXXSTYQLXXXXXCX

SEQ ID NO: 2577 - protein, 15 aa, synthetic construct
  REGION 1..15: note = epitope
  REGION 1..3: note = misc_feature - Xaa can be any naturally occurring amino acid
  REGION 9..15: note = misc_feature - Xaa can be any naturally occurring amino acid
XXXSTYQLXXXXXXX

SEQ ID NO: 2578 - protein, 7 aa, synthetic construct
  REGION 1..7: note = epitope
YQLVQQL

SEQ ID NO: 2579 - protein, 6 aa, synthetic construct
  REGION 1..6: note = epitope
YQLVQQ

SEQ ID NO: 2580 - protein, 15 aa, synthetic construct
  REGION 1..15: note = epitope
  SITE 1: note = misc_feature - Xaa can be any naturally occurring amino acid
  SITE 3: note = misc_feature - Xaa can be any naturally occurring amino acid
  REGION 10..13: note = misc_feature - Xaa can be any naturally occurring amino acid
  SITE 15: note = misc_feature - Xaa can be any naturally occurring amino acid
XQXSTYQLVXXXXCX

SEQ ID NO: 2581 - protein, 15 aa, synthetic construct
  REGION 1..15: note = epitope
  REGION 1..4: note = misc_feature - Xaa can be any naturally occurring amino acid
  SITE 7: note = misc_feature - Xaa can be any naturally occurring amino acid
  REGION 10..15: note = misc_feature - Xaa can be any naturally occurring amino acid
XXXXTYXLVXXXXXX

SEQ ID NO: 2582 - protein, 7 aa, synthetic construct
  REGION 1..7: note = epitope
YQLVQQL

SEQ ID NO: 2583 - protein, 5 aa, synthetic construct
  REGION 1..5: note = epitope
QLVQQ

SEQ ID NO: 2584 - protein, 4 aa, synthetic construct
  REGION 1..4: note = epitope
QLVQ

SEQ ID NO: 2585 - protein, 10 aa, synthetic construct
  REGION 1..10: note = epitope
LQQSTYQLVQ

SEQ ID NO: 2586 - protein, 8 aa, synthetic construct
  REGION 1..8: note = epitope
LQQSTYQL

SEQ ID NO: 2587 - protein, 8 aa, synthetic construct
  REGION 1..8: note = epitope
QLVQQLCC

SEQ ID NO: 2588 - protein, 4 aa, synthetic construct
  REGION 1..4: note = epitope
QQLC

SEQ ID NO: 2589 - protein, 10 aa, synthetic construct
  REGION 1..10: note = epitope
QSTYQLVQQL

SEQ ID NO: 2590 - protein, 8 aa, synthetic construct
  REGION 1..8: note = epitope
QLVQQLCC

SEQ ID NO: 2591 - protein, 6 aa, synthetic construct
  REGION 1..6: note = epitope
QLVQQL

SEQ ID NO: 2592 - protein, 6 aa, synthetic construct
  REGION 1..6: note = epitope
YQLVQQ

SEQ ID NO: 2593 - protein, 4 aa, synthetic construct
  REGION 1..4: note = epitope
QLVQ

SEQ ID NO: 2594 - protein, 6 aa, synthetic construct
  REGION 1..6: note = epitope
QLVQQL

SEQ ID NO: 2595 - protein, 4 aa, synthetic construct
  REGION 1..4: note = epitope
VQQL

SEQ ID NO: 2596 - protein, 15 aa, synthetic construct
  REGION 1..15: note = epitope
  REGION 1..3: note = misc_feature - Xaa can be any naturally occurring amino acid
  SITE 5: note = misc_feature - Xaa can be any naturally occurring amino acid
  REGION 7..11: note = misc_feature - Xaa can be any naturally occurring amino acid
  SITE 13: note = misc_feature - Xaa can be any naturally occurring amino acid
  SITE 15: note = misc_feature - Xaa can be any naturally occurring amino acid
XXXSXYXXXXXLXCX

SEQ ID NO: 2597 - protein, 8 aa, synthetic construct
  REGION 1..8: note = epitope
QQSTYQLV

SEQ ID NO: 2598 - protein, 9 aa, synthetic construct
  REGION 1..9: note = epitope
YQLVQQLCC

SEQ ID NO: 2599 - protein, 8 aa, synthetic construct
  REGION 1..8: note = epitope
QLVQQLCC

SEQ ID NO: 2600 - protein, 4 aa, synthetic construct
  REGION 1..4: note = epitope
QQLC

SEQ ID NO: 2601 - protein, 9 aa, synthetic construct
  REGION 1..9: note = epitope
QQSTYQLVQ

SEQ ID NO: 2602 - protein, 8 aa, synthetic construct
  REGION 1..8: note = epitope
QQSTYQLV

SEQ ID NO: 2603 - protein, 7 aa, synthetic construct
  REGION 1..7: note = epitope
QLVQQLC

SEQ ID NO: 2604 - protein, 5 aa, synthetic construct
  REGION 1..5: note = epitope
YQLVQ

SEQ ID NO: 2605 - protein, 4 aa, synthetic construct
  REGION 1..4: note = epitope
QLVQ

SEQ ID NO: 2606 - protein, 6 aa, synthetic construct
  REGION 1..6: note = epitope
QLVQQL

SEQ ID NO: 2607 - protein, 10 aa, synthetic construct
  REGION 1..10: note = epitope
LQQSTYQLVQ

SEQ ID NO: 2608 - protein, 6 aa, synthetic construct
  REGION 1..6: note = epitope
QLVQQL

SEQ ID NO: 2609 - protein, 8 aa, synthetic construct
  REGION 1..8: note = epitope
QLVQQLCC

SEQ ID NO: 2610 - protein, 9 aa, synthetic construct
  REGION 1..9: note = epitope
LQQSTYQLV

SEQ ID NO: 2611 - protein, 10 aa, synthetic construct
  REGION 1..10: note = epitope
QSTYQLVQQL

SEQ ID NO: 2612 - protein, 8 aa, synthetic construct
  REGION 1..8: note = epitope
QLVQQLCC

SEQ ID NO: 2613 - protein, 15 aa, synthetic construct
  REGION 1..15: note = epitope
SAKPLLASLSKRVLT

SEQ ID NO: 2614 - protein, 5 aa, synthetic construct
  REGION 1..5: note = epitope
AKPLL

SEQ ID NO: 2615 - protein, 6 aa, synthetic construct
  REGION 1..6: note = epitope
SLSKRV

SEQ ID NO: 2616 - protein, 5 aa, synthetic construct
  REGION 1..5: note = epitope
AKPLL

SEQ ID NO: 2617 - protein, 4 aa, synthetic construct
  REGION 1..4: note = epitope
SKRV

SEQ ID NO: 2618 - protein, 15 aa, synthetic construct
  REGION 1..15: note = epitope
  REGION 1..5: note = misc_feature - Xaa can be any naturally occurring amino acid
  REGION 12..13: note = misc_feature - Xaa can be any naturally occurring amino acid
  SITE 15: note = misc_feature - Xaa can be any naturally occurring amino acid
XXXXXLASLSKXXLX

SEQ ID NO: 2619 - protein, 6 aa, synthetic construct
  REGION 1..6: note = epitope
LASLSK

SEQ ID NO: 2620 - protein, 15 aa, synthetic construct
  REGION 1..15: note = epitope
  REGION 1..8: note = misc_feature - Xaa can be any naturally occurring amino acid
  SITE 11: note = misc_feature - Xaa can be any naturally occurring amino acid
  SITE 13: note = misc_feature - Xaa can be any naturally occurring amino acid
  SITE 15: note = misc_feature - Xaa can be any naturally occurring amino acid
XXXXXXXXLSXRXLX

SEQ ID NO: 2621 - protein, 4 aa, synthetic construct
  REGION 1..4: note = epitope
LLAS

SEQ ID NO: 2622 - protein, 15 aa, synthetic construct
  REGION 1..15: note = epitope
  REGION 2..5: note = misc_feature - Xaa can be any naturally occurring amino acid
  REGION 8..12: note = misc_feature - Xaa can be any naturally occurring amino acid
  SITE 15: note = misc_feature - Xaa can be any naturally occurring amino acid
SXXXXLAXXXXXVLX

SEQ ID NO: 2623 - protein, 6 aa, synthetic construct
  REGION 1..6: note = epitope
SAKPLL

SEQ ID NO: 2624 - protein, 5 aa, synthetic construct
  REGION 1..5: note = epitope
AKPLL

SEQ ID NO: 2625 - protein, 7 aa, synthetic construct
  REGION 1..7: note = epitope
ASLSKRV

SEQ ID NO: 2626 - protein, 5 aa, synthetic construct
  REGION 1..5: note = epitope
LSKRV

SEQ ID NO: 2627 - protein, 9 aa, synthetic construct
  REGION 1..9: note = epitope
LLASLSKRV

SEQ ID NO: 2628 - protein, 15 aa, synthetic construct
  REGION 1..15: note = epitope
  REGION 1..4: note = misc_feature - Xaa can be any naturally occurring amino acid
  REGION 12..15: note = misc_feature - Xaa can be any naturally occurring amino acid
XXXXLLASLSKXXXX

SEQ ID NO: 2629 - protein, 15 aa, synthetic construct
  REGION 1..15: note = epitope
  REGION 1..4: note = misc_feature - Xaa can be any naturally occurring amino acid
  SITE 8: note = misc_feature - Xaa can be any naturally occurring amino acid
  REGION 12..15: note = misc_feature - Xaa can be any naturally occurring amino acid
XXXXLLAXLSKXXXX

SEQ ID NO: 2630 - protein, 6 aa, synthetic construct
  REGION 1..6: note = epitope
LASLSK

SEQ ID NO: 2631 - protein, 15 aa, synthetic construct
  REGION 1..15: note = epitope
RFEKEAAEMNKRSFK

SEQ ID NO: 2632 - protein, 15 aa, synthetic construct
  REGION 1..15: note = epitope
  REGION 1..3: note = misc_feature - Xaa can be any naturally occurring amino acid
  REGION 5..6: note = misc_feature - Xaa can be any naturally occurring amino acid
  REGION 10..15: note = misc_feature - Xaa can be any naturally occurring amino acid
XXXKXXAEMXXXXXX

SEQ ID NO: 2633 - protein, 6 aa, synthetic construct
  REGION 1..6: note = epitope
KEAAEM

SEQ ID NO: 2634 - protein, 4 aa, synthetic construct
  REGION 1..4: note = epitope
EAAE

SEQ ID NO: 2635 - protein, 15 aa, synthetic construct
  REGION 1..15: note = epitope
  REGION 1..3: note = misc_feature - Xaa can be any naturally occurring amino acid
  SITE 6: note = misc_feature - Xaa can be any naturally occurring amino acid
  REGION 11..15: note = misc_feature - Xaa can be any naturally occurring amino acid
XXXKEXAEMNXXXXX

SEQ ID NO: 2636 - protein, 15 aa, synthetic construct
  REGION 1..15: note = epitope
  REGION 1..3: note = misc_feature - Xaa can be any naturally occurring amino acid
  SITE 6: note = misc_feature - Xaa can be any naturally occurring amino acid
  REGION 10..15: note = misc_feature - Xaa can be any naturally occurring amino acid
XXXKEXAEMXXXXXX

SEQ ID NO: 2637 - protein, 6 aa, synthetic construct
  REGION 1..6: note = epitope
KEAAEM

SEQ ID NO: 2638 - protein, 4 aa, synthetic construct
  REGION 1..4: note = epitope
EAAE

SEQ ID NO: 2639 - protein, 15 aa, synthetic construct
  REGION 1..15: note = epitope
  REGION 1..3: note = misc_feature - Xaa can be any naturally occurring amino acid
  REGION 5..9: note = misc_feature - Xaa can be any naturally occurring amino acid
  REGION 13..15: note = misc_feature - Xaa can be any naturally occurring amino acid
XXXKXXXXXNKRXXX

SEQ ID NO: 2640 - protein, 10 aa, synthetic construct
  REGION 1..10: note = epitope
RFEKEAAEMN

SEQ ID NO: 2641 - protein, 6 aa, synthetic construct
  REGION 1..6: note = epitope
KEAAEM

SEQ ID NO: 2642 - protein, 6 aa, synthetic construct
  REGION 1..6: note = epitope
KEAAEM

SEQ ID NO: 2643 - protein, 7 aa, synthetic construct
  REGION 1..7: note = epitope
KEAAEMN

SEQ ID NO: 2644 - protein, 7 aa, synthetic construct
  REGION 1..7: note = epitope
  SITE 3: note = misc_feature - Xaa can be any naturally occurring amino acid
  SITE 6: note = misc_feature - Xaa can be any naturally occurring amino acid
KEXAEXN

SEQ ID NO: 2645 - protein, 15 aa, synthetic construct
  REGION 1..15: note = epitope
  REGION 1..3: note = misc_feature - Xaa can be any naturally occurring amino acid
  SITE 6: note = misc_feature - Xaa can be any naturally occurring amino acid
  SITE 9: note = misc_feature - Xaa can be any naturally occurring amino acid
  REGION 13..15: note = misc_feature - Xaa can be any naturally occurring amino acid
XXXKEXAEXNKRXXX

SEQ ID NO: 2646 - protein, 7 aa, synthetic construct
  REGION 1..7: note = epitope
KEAAEMN

SEQ ID NO: 2647 - protein, 6 aa, synthetic construct
  REGION 1..6: note = epitope
KEAAEM

SEQ ID NO: 2648 - protein, 6 aa, synthetic construct
  REGION 1..6: note = epitope
NKRSFK

SEQ ID NO: 2649 - protein, 5 aa, synthetic construct
  REGION 1..5: note = epitope
KEAAE

SEQ ID NO: 2650 - protein, 5 aa, synthetic construct
  REGION 1..5: note = epitope
  SITE 3: note = misc_feature - Xaa can be any naturally occurring amino acid
KEXAE

SEQ ID NO: 2651 - protein, 15 aa, synthetic construct
  REGION 1..15: note = epitope
  SITE 2: note = misc_feature - Xaa can be any naturally occurring amino acid
  SITE 6: note = misc_feature - Xaa can be any naturally occurring amino acid
  REGION 10..15: note = misc_feature - Xaa can be any naturally occurring amino acid
RXEKEXAEMXXXXXX

SEQ ID NO: 2652 - protein, 6 aa, synthetic construct
  REGION 1..6: note = epitope
KEAAEM

SEQ ID NO: 2653 - protein, 4 aa, synthetic construct
  REGION 1..4: note = epitope
EAAE

SEQ ID NO: 2654 - protein, 15 aa, synthetic construct
  REGION 1..15: note = epitope
  REGION 1..3: note = misc_feature - Xaa can be any naturally occurring amino acid
  REGION 11..15: note = misc_feature - Xaa can be any naturally occurring amino acid
XXXKEAAEMNXXXXX

SEQ ID NO: 2655 - protein, 7 aa, synthetic construct
  REGION 1..7: note = epitope
EAAEMNK

SEQ ID NO: 2656 - protein, 7 aa, synthetic construct
  REGION 1..7: note = epitope
  SITE 5: note = misc_feature - Xaa can be any naturally occurring amino acid
  SITE 7: note = misc_feature - Xaa can be any naturally occurring amino acid
EAAEXNX

SEQ ID NO: 2657 - protein, 15 aa, synthetic construct
  REGION 1..15: note = epitope
  REGION 1..2: note = misc_feature - Xaa can be any naturally occurring amino acid
  REGION 4..9: note = misc_feature - Xaa can be any naturally occurring amino acid
  REGION 13..15: note = misc_feature - Xaa can be any naturally occurring amino acid
XXEXXXXXXNKRXXX

SEQ ID NO: 2658 - protein, 7 aa, synthetic construct
  REGION 1..7: note = epitope
FEKEAAE

SEQ ID NO: 2659 - protein, 10 aa, synthetic construct
  REGION 1..10: note = epitope
EAAEMNKRSF

SEQ ID NO: 2660 - protein, 7 aa, synthetic construct
  REGION 1..7: note = epitope
EMNKRSF

SEQ ID NO: 2661 - protein, 15 aa, synthetic construct
  REGION 1..15: note = epitope
  REGION 8..9: note = misc_feature - Xaa can be any naturally occurring amino acid
  SITE 11: note = misc_feature - Xaa can be any naturally occurring amino acid
  REGION 13..14: note = misc_feature - Xaa can be any naturally occurring amino acid
RFEKEAAXXNXRXXK

SEQ ID NO: 2662 - protein, 15 aa, synthetic construct
  REGION 1..15: note = epitope
  SITE 1: note = misc_feature - Xaa can be any naturally occurring amino acid
  REGION 5..6: note = misc_feature - Xaa can be any naturally occurring amino acid
  REGION 8..9: note = misc_feature - Xaa can be any naturally occurring amino acid
  SITE 11: note = misc_feature - Xaa can be any naturally occurring amino acid
  REGION 13..15: note = misc_feature - Xaa can be any naturally occurring amino acid
XFEKXXAXXNXRXXX

SEQ ID NO: 2663 - protein, 6 aa, synthetic construct
  REGION 1..6: note = epitope
FEKEAA

SEQ ID NO: 2664 - protein, 5 aa, synthetic construct
  REGION 1..5: note = epitope
FEKEA

SEQ ID NO: 2665 - protein, 15 aa, synthetic construct
  REGION 1..15: note = epitope
  SITE 6: note = misc_feature - Xaa can be any naturally occurring amino acid
  SITE 11: note = misc_feature - Xaa can be any naturally occurring amino acid
  SITE 13: note = misc_feature - Xaa can be any naturally occurring amino acid
RFEKEXAEMNXRXFK

SEQ ID NO: 2666 - protein, 15 aa, synthetic construct
  REGION 1..15: note = epitope
  REGION 1..2: note = misc_feature - Xaa can be any naturally occurring amino acid
  SITE 6: note = misc_feature - Xaa can be any naturally occurring amino acid
  SITE 8: note = misc_feature - Xaa can be any naturally occurring amino acid
  REGION 10..13: note = misc_feature - Xaa can be any naturally occurring amino acid
  SITE 15: note = misc_feature - Xaa can be any naturally occurring amino acid
XXEKEXAXMXXXXFX

SEQ ID NO: 2667 - protein, 10 aa, synthetic construct
  REGION 1..10: note = epitope
RFEKEAAEMN

SEQ ID NO: 2668 - protein, 5 aa, synthetic construct
  REGION 1..5: note = epitope
KEAAE

SEQ ID NO: 2669 - protein, 5 aa, synthetic construct
  REGION 1..5: note = epitope
  SITE 3: note = misc_feature - Xaa can be any naturally occurring amino acid
KEXAE

SEQ ID NO: 2670 - protein, 15 aa, synthetic construct
  REGION 1..15: note = epitope
  REGION 6..15: note = misc_feature - Xaa can be any naturally occurring amino acid
RFEKEXXXXXXXXXX

SEQ ID NO: 2671 - protein, 9 aa, synthetic construct
  REGION 1..9: note = epitope
AEMNKRSFK

SEQ ID NO: 2672 - protein, 10 aa, synthetic construct
  REGION 1..10: note = epitope
RFEKEAAEMN

SEQ ID NO: 2673 - protein, 8 aa, synthetic construct
  REGION 1..8: note = epitope
EAAEMNKR

SEQ ID NO: 2674 - protein, 15 aa, synthetic construct
  REGION 1..15: note = epitope
YKGPTLLEALDQINE

SEQ ID NO: 2675 - protein, 15 aa, synthetic construct
  REGION 1..15: note = epitope
  REGION 2..5: note = misc_feature - Xaa can be any naturally occurring amino acid
  REGION 7..11: note = misc_feature - Xaa can be any naturally occurring amino acid
  SITE 15: note = misc_feature - Xaa can be any naturally occurring amino acid
YXXXXLXXXXXQINX

SEQ ID NO: 2676 - protein, 6 aa, synthetic construct
  REGION 1..6: note = epitope
YKGPTL

SEQ ID NO: 2677 - protein, 6 aa, synthetic construct
  REGION 1..6: note = epitope
YKGPTL

SEQ ID NO: 2678 - protein, 15 aa, synthetic construct
  REGION 1..15: note = epitope
  REGION 2..3: note = misc_feature - Xaa can be any naturally occurring amino acid
  SITE 5: note = misc_feature - Xaa can be any naturally occurring amino acid
  REGION 7..11: note = misc_feature - Xaa can be any naturally occurring amino acid
  REGION 13..15: note = misc_feature - Xaa can be any naturally occurring amino acid
YXXPXLXXXXXQXXX

SEQ ID NO: 2679 - protein, 6 aa, synthetic construct
  REGION 1..6: note = epitope
YKGPTL

SEQ ID NO: 2680 - protein, 6 aa, synthetic construct
  REGION 1..6: note = epitope
YKGPTL

SEQ ID NO: 2681 - protein, 15 aa, synthetic construct
  REGION 1..15: note = epitope
  REGION 7..15: note = misc_feature - Xaa can be any naturally occurring amino acid
YKGPTLXXXXXXXXX

SEQ ID NO: 2682 - protein, 6 aa, synthetic construct
  REGION 1..6: note = epitope
YKGPTL

SEQ ID NO: 2683 - protein, 5 aa, synthetic construct
  REGION 1..5: note = epitope
KGPTL

SEQ ID NO: 2684 - protein, 6 aa, synthetic construct
  REGION 1..6: note = epitope
YKGPTL

SEQ ID NO: 2685 - protein, 6 aa, synthetic construct
  REGION 1..6: note = epitope
YKGPTL

SEQ ID NO: 2686 - protein, 6 aa, synthetic construct
  REGION 1..6: note = epitope
  SITE 3: note = misc_feature - Xaa can be any naturally occurring amino acid
  SITE 5: note = misc_feature - Xaa can be any naturally occurring amino acid
YKXPXL

SEQ ID NO: 2687 - protein, 15 aa, synthetic construct
  REGION 1..15: note = epitope
  SITE 3: note = misc_feature - Xaa can be any naturally occurring amino acid
  REGION 5..11: note = misc_feature - Xaa can be any naturally occurring amino acid
  SITE 13: note = misc_feature - Xaa can be any naturally occurring amino acid
  SITE 15: note = misc_feature - Xaa can be any naturally occurring amino acid
YKXPXXXXXXXQXNX

SEQ ID NO: 2688 - protein, 6 aa, synthetic construct
  REGION 1..6: note = epitope
YKGPTL

SEQ ID NO: 2689 - protein, 6 aa, synthetic construct
  REGION 1..6: note = epitope
YKGPTL

SEQ ID NO: 2690 - protein, 15 aa, synthetic construct
  REGION 1..15: note = epitope
  REGION 5..8: note = misc_feature - Xaa can be any naturally occurring amino acid
  REGION 13..15: note = misc_feature - Xaa can be any naturally occurring amino acid
YKGPXXXXALDQXXX

SEQ ID NO: 2691 - protein, 15 aa, synthetic construct
  REGION 1..15: note = epitope
  REGION 3..8: note = misc_feature - Xaa can be any naturally occurring amino acid
  SITE 11: note = misc_feature - Xaa can be any naturally occurring amino acid
  REGION 13..15: note = misc_feature - Xaa can be any naturally occurring amino acid
YKXXXXXXALXQXXX

SEQ ID NO: 2692 - protein, 6 aa, synthetic construct
  REGION 1..6: note = epitope
YKGPTL

SEQ ID NO: 2693 - protein, 6 aa, synthetic construct
  REGION 1..6: note = epitope
YKGPTL

SEQ ID NO: 2694 - protein, 6 aa, synthetic construct
  REGION 1..6: note = epitope
YKGPTL

SEQ ID NO: 2695 - protein, 6 aa, synthetic construct
  REGION 1..6: note = epitope
YKGPTL

SEQ ID NO: 2696 - protein, 6 aa, synthetic construct
  REGION 1..6: note = epitope
YKGPTL

SEQ ID NO: 2697 - protein, 6 aa, synthetic construct
  REGION 1..6: note = epitope
YKGPTL

SEQ ID NO: 2698 - protein, 5 aa, synthetic construct
  REGION 1..5: note = epitope
KGPTL

SEQ ID NO: 2699 - protein, 6 aa, synthetic construct
  REGION 1..6: note = epitope
YKGPTL

SEQ ID NO: 2700 - protein, 6 aa, synthetic construct
  REGION 1..6: note = epitope
YKGPTL

SEQ ID NO: 2701 - protein, 15 aa, synthetic construct
  REGION 1..15: note = epitope
VYKIGGIGTVPVGRV

SEQ ID NO: 2702 - protein, 10 aa, synthetic construct
  REGION 1..10: note = epitope
YKIGGIGTVP

SEQ ID NO: 2703 - protein, 9 aa, synthetic construct
  REGION 1..9: note = epitope
YKIGGIGTV

SEQ ID NO: 2704 - protein, 6 aa, synthetic construct
  REGION 1..6: note = epitope
YKIGGI

SEQ ID NO: 2705 - protein, 10 aa, synthetic construct
  REGION 1..10: note = epitope
YKIGGIGTVP

SEQ ID NO: 2706 - protein, 9 aa, synthetic construct
  REGION 1..9: note = epitope
YKIGGIGTV

SEQ ID NO: 2707 - protein, 8 aa, synthetic construct
  REGION 1..8: note = epitope
YKIGGIGT

SEQ ID NO: 2708 - protein, 9 aa, synthetic construct
  REGION 1..9: note = epitope
YKIGGIGTV

SEQ ID NO: 2709 - protein, 8 aa, synthetic construct
  REGION 1..8: note = epitope
YKIGGIGT

SEQ ID NO: 2710 - protein, 5 aa, synthetic construct
  REGION 1..5: note = epitope
YKIGG

SEQ ID NO: 2711 - protein, 8 aa, synthetic construct
  REGION 1..8: note = epitope
YKIGGIGT

SEQ ID NO: 2712 - protein, 5 aa, synthetic construct
  REGION 1..5: note = epitope
YKIGG

SEQ ID NO: 2713 - protein, 4 aa, synthetic construct
  REGION 1..4: note = epitope
KIGG

SEQ ID NO: 2714 - protein, 10 aa, synthetic construct
  REGION 1..10: note = epitope
GIGTVPVGRV

SEQ ID NO: 2715 - protein, 9 aa, synthetic construct
  REGION 1..9: note = epitope
YKIGGIGTV

SEQ ID NO: 2716 - protein, 6 aa, synthetic construct
  REGION 1..6: note = epitope
YKIGGI

SEQ ID NO: 2717 - protein, 5 aa, synthetic construct
  REGION 1..5: note = epitope
YKIGG

SEQ ID NO: 2718 - protein, 10 aa, synthetic construct
  REGION 1..10: note = epitope
GIGTVPVGRV

SEQ ID NO: 2719 - protein, 5 aa, synthetic construct
  REGION 1..5: note = epitope
YKIGG

SEQ ID NO: 2720 - protein, 10 aa, synthetic construct
  REGION 1..10: note = epitope
IGGIGTVPVG

SEQ ID NO: 2721 - protein, 8 aa, synthetic construct
  REGION 1..8: note = epitope
GIGTVPVG

SEQ ID NO: 2722 - protein, 5 aa, synthetic construct
  REGION 1..5: note = epitope
YKIGG

SEQ ID NO: 2723 - protein, 4 aa, synthetic construct
  REGION 1..4: note = epitope
KIGG

SEQ ID NO: 2724 - protein, 10 aa, synthetic construct
  REGION 1..10: note = epitope
GIGTVPVGRV

SEQ ID NO: 2725 - protein, 5 aa, synthetic construct
  REGION 1..5: note = epitope
YKIGG

SEQ ID NO: 2726 - protein, 4 aa, synthetic construct
  REGION 1..4: note = epitope
KIGG

SEQ ID NO: 2727 - protein, 9 aa, synthetic construct
  REGION 1..9: note = epitope
GIGTVPVGR

SEQ ID NO: 2728 - protein, 15 aa, synthetic construct
  REGION 1..15: note = epitope
  SITE 1: note = misc_feature - Xaa can be any naturally occurring amino acid
  REGION 3..11: note = misc_feature - Xaa can be any naturally occurring amino acid
  SITE 15: note = misc_feature - Xaa can be any naturally occurring amino acid
XYXXXXXXXXXVGRX

SEQ ID NO: 2729 - protein, 10 aa, synthetic construct
  REGION 1..10: note = epitope
YKIGGIGTVP

SEQ ID NO: 2730 - protein, 9 aa, synthetic construct
  REGION 1..9: note = epitope
YKIGGIGTV

SEQ ID NO: 2731 - protein, 6 aa, synthetic construct
  REGION 1..6: note = epitope
YKIGGI

SEQ ID NO: 2732 - protein, 10 aa, synthetic construct
  REGION 1..10: note = epitope
YKIGGIGTVP

SEQ ID NO: 2733 - protein, 6 aa, synthetic construct
  REGION 1..6: note = epitope
YKIGGI

SEQ ID NO: 2734 - protein, 5 aa, synthetic construct
  REGION 1..5: note = epitope
YKIGG

SEQ ID NO: 2735 - protein, 10 aa, synthetic construct
  REGION 1..10: note = epitope
GIGTVPVGRV

SEQ ID NO: 2736 - protein, 10 aa, synthetic construct
  REGION 1..10: note = epitope
YKIGGIGTVP

SEQ ID NO: 2737 - protein, 4 aa, synthetic construct
  REGION 1..4: note = epitope
KIGG

SEQ ID NO: 2738 - protein, 5 aa, synthetic construct
  REGION 1..5: note = epitope
VPVGR

SEQ ID NO: 2739 - protein, 7 aa, synthetic construct
  REGION 1..7: note = epitope
YKIGGIG

SEQ ID NO: 2740 - protein, 5 aa, synthetic construct
  REGION 1..5: note = epitope
KIGGI

SEQ ID NO: 2741 - protein, 10 aa, synthetic construct
  REGION 1..10: note = epitope
GIGTVPVGRV

SEQ ID NO: 2742 - protein, 10 aa, synthetic construct
  REGION 1..10: note = epitope
YKIGGIGTVP

SEQ ID NO: 2743 - protein, 9 aa, synthetic construct
  REGION 1..9: note = epitope
YKIGGIGTV

SEQ ID NO: 2744 - protein, 15 aa, synthetic construct
  REGION 1..15: note = epitope
  SITE 1: note = misc_feature - Xaa can be any naturally occurring amino acid
  SITE 4: note = misc_feature - Xaa can be any naturally occurring amino acid
  REGION 6..11: note = misc_feature - Xaa can be any naturally occurring amino acid
  REGION 13..15: note = misc_feature - Xaa can be any naturally occurring amino acid
XYKXGXXXXXXVXXX

SEQ ID NO: 2745 - protein, 6 aa, synthetic construct
  REGION 1..6: note = epitope
KIGGIG

SEQ ID NO: 2746 - protein, 5 aa, synthetic construct
  REGION 1..5: note = epitope
KIGGI

SEQ ID NO: 2747 - protein, 8 aa, synthetic construct
  REGION 1..8: note = epitope
YKIGGIGT

SEQ ID NO: 2748 - protein, 5 aa, synthetic construct
  REGION 1..5: note = epitope
YKIGG

SEQ ID NO: 2749 - protein, 4 aa, synthetic construct
  REGION 1..4: note = epitope
KIGG

SEQ ID NO: 2750 - protein, 9 aa, synthetic construct
  REGION 1..9: note = epitope
YKIGGIGTV

SEQ ID NO: 2751 - protein, 4 aa, synthetic construct
  REGION 1..4: note = epitope
KIGG

SEQ ID NO: 2752 - protein, 10 aa, synthetic construct
  REGION 1..10: note = epitope
YKIGGIGTVP

SEQ ID NO: 2753 - protein, 9 aa, synthetic construct
  REGION 1..9: note = epitope
YKIGGIGTV

SEQ ID NO: 2754 - protein, 9 aa, synthetic construct
  REGION 1..9: note = epitope
YKIGGIGTV

SEQ ID NO: 2755 - protein, 8 aa, synthetic construct
  REGION 1..8: note = epitope
KIGGIGTV

SEQ ID NO: 2756 - protein, 7 aa, synthetic construct
  REGION 1..7: note = epitope
KIGGIGT

SEQ ID NO: 2757 - protein, 10 aa, synthetic construct
  REGION 1..10: note = epitope
YKIGGIGTVP

SEQ ID NO: 2758 - protein, 9 aa, synthetic construct
  REGION 1..9: note = epitope
YKIGGIGTV

SEQ ID NO: 2759 - protein, 10 aa, synthetic construct
  REGION 1..10: note = epitope
YKIGGIGTVP

SEQ ID NO: 2760 - protein, 9 aa, synthetic construct
  REGION 1..9: note = epitope
YKIGGIGTV

SEQ ID NO: 2761 - protein, 10 aa, synthetic construct
  REGION 1..10: note = epitope
VYKIGGIGTV

SEQ ID NO: 2762 - protein, 9 aa, synthetic construct
  REGION 1..9: note = epitope
YKIGGIGTV

SEQ ID NO: 2763 - protein, 9 aa, synthetic construct
  REGION 1..9: note = epitope
YKIGGIGTV

SEQ ID NO: 2764 - protein, 4 aa, synthetic construct
  REGION 1..4: note = epitope
KIGG

SEQ ID NO: 2765 - protein, 5 aa, synthetic construct
  REGION 1..5: note = epitope
VPVGR

SEQ ID NO: 2766 - protein, 7 aa, synthetic construct
  REGION 1..7: note = epitope
YKIGGIG

SEQ ID NO: 2767 - protein, 4 aa, synthetic construct
  REGION 1..4: note = epitope
KIGG

SEQ ID NO: 2768 - protein, 6 aa, synthetic construct
  REGION 1..6: note = epitope
VPVGRV

SEQ ID NO: 2769 - protein, 9 aa, synthetic construct
  REGION 1..9: note = epitope
YKIGGIGTV

SEQ ID NO: 2770 - protein, 5 aa, synthetic construct
  REGION 1..5: note = epitope
YKIGG

SEQ ID NO: 2771 - protein, 7 aa, synthetic construct
  REGION 1..7: note = epitope
YKIGGIG

SEQ ID NO: 2772 - protein, 5 aa, synthetic construct
  REGION 1..5: note = epitope
YKIGG

SEQ ID NO: 2773 - protein, 9 aa, synthetic construct
  REGION 1..9: note = epitope
IGTVPVGRV

SEQ ID NO: 2774 - protein, 15 aa, synthetic construct
  REGION 1..15: note = epitope
FLKNGDAGIVKMIPT

SEQ ID NO: 2775 - protein, 5 aa, synthetic construct
  REGION 1..5: note = epitope
KNGDA

SEQ ID NO: 2776 - protein, 4 aa, synthetic construct
  REGION 1..4: note = epitope
KNGD

SEQ ID NO: 2777 - protein, 10 aa, synthetic construct
  REGION 1..10: note = epitope
KNGDAGIVKM

SEQ ID NO: 2778 - protein, 9 aa, synthetic construct
  REGION 1..9: note = epitope
DAGIVKMIP

SEQ ID NO: 2779 - protein, 5 aa, synthetic construct
  REGION 1..5: note = epitope
AGIVK

SEQ ID NO: 2780 - protein, 7 aa, synthetic construct
  REGION 1..7: note = epitope
LKNGDAG

SEQ ID NO: 2781 - protein, 4 aa, synthetic construct
  REGION 1..4: note = epitope
KNGD

SEQ ID NO: 2782 - protein, 15 aa, synthetic construct
  REGION 1..15: note = epitope
  REGION 1..10: note = misc_feature - Xaa can be any naturally occurring amino acid
XXXXXXXXXXKMIPT

SEQ ID NO: 2783 - protein, 8 aa, synthetic construct
  REGION 1..8: note = epitope
FLKNGDAG

SEQ ID NO: 2784 - protein, 5 aa, synthetic construct
  REGION 1..5: note = epitope
LKNGD

SEQ ID NO: 2785 - protein, 15 aa, synthetic construct
  REGION 1..15: note = epitope
  REGION 1..11: note = misc_feature - Xaa can be any naturally occurring amino acid
XXXXXXXXXXXMIPT

SEQ ID NO: 2786 - protein, 15 aa, synthetic construct
  REGION 1..15: note = epitope
  REGION 1..7: note = misc_feature - Xaa can be any naturally occurring amino acid
  REGION 9..10: note = misc_feature - Xaa can be any naturally occurring amino acid
  SITE 13: note = misc_feature - Xaa can be any naturally occurring amino acid
XXXXXXXGXXKMXPT

SEQ ID NO: 2787 - protein, 5 aa, synthetic construct
  REGION 1..5: note = epitope
LKNGD

SEQ ID NO: 2788 - protein, 4 aa, synthetic construct
  REGION 1..4: note = epitope
KNGD

SEQ ID NO: 2789 - protein, 15 aa, synthetic construct
  REGION 1..15: note = epitope
  REGION 1..7: note = misc_feature - Xaa can be any naturally occurring amino acid
  REGION 9..10: note = misc_feature - Xaa can be any naturally occurring amino acid
XXXXXXXGXXKMIPT

SEQ ID NO: 2790 - protein, 10 aa, synthetic construct
  REGION 1..10: note = epitope
LKNGDAGIVK

SEQ ID NO: 2791 - protein, 6 aa, synthetic construct
  REGION 1..6: note = epitope
VKMIPT

SEQ ID NO: 2792 - protein, 6 aa, synthetic construct
  REGION 1..6: note = epitope
  SITE 1: note = misc_feature - Xaa can be any naturally occurring amino acid
XKMIPT

SEQ ID NO: 2793 - protein, 7 aa, synthetic construct
  REGION 1..7: note = epitope
LKNGDAG

SEQ ID NO: 2794 - protein, 4 aa, synthetic construct
  REGION 1..4: note = epitope
KNGD

SEQ ID NO: 2795 - protein, 5 aa, synthetic construct
  REGION 1..5: note = epitope
LKNGD

SEQ ID NO: 2796 - protein, 4 aa, synthetic construct
  REGION 1..4: note = epitope
KNGD

SEQ ID NO: 2797 - protein, 5 aa, synthetic construct
  REGION 1..5: note = epitope
LKNGD

SEQ ID NO: 2798 - protein, 5 aa, synthetic construct
  REGION 1..5: note = epitope
LKNGD

SEQ ID NO: 2799 - protein, 4 aa, synthetic construct
  REGION 1..4: note = epitope
KNGD

SEQ ID NO: 2800 - protein, 4 aa, synthetic construct
  REGION 1..4: note = epitope
KNGD

SEQ ID NO: 2801 - protein, 4 aa, synthetic construct
  REGION 1..4: note = epitope
KNGD

SEQ ID NO: 2802 - protein, 6 aa, synthetic construct
  REGION 1..6: note = epitope
VKMIPT

SEQ ID NO: 2803 - protein, 6 aa, synthetic construct
  REGION 1..6: note = epitope
KNGDAG

SEQ ID NO: 2804 - protein, 5 aa, synthetic construct
  REGION 1..5: note = epitope
NGDAG

SEQ ID NO: 2805 - protein, 15 aa, synthetic construct
  REGION 1..15: note = epitope
  REGION 1..10: note = misc_feature - Xaa can be any naturally occurring amino acid
XXXXXXXXXXKMIPT

SEQ ID NO: 2806 - protein, 6 aa, synthetic construct
  REGION 1..6: note = epitope
VKMIPT

SEQ ID NO: 2807 - protein, 6 aa, synthetic construct
  REGION 1..6: note = epitope
KNGDAG

SEQ ID NO: 2808 - protein, 4 aa, synthetic construct
  REGION 1..4: note = epitope
KNGD

SEQ ID NO: 2809 - protein, 15 aa, synthetic construct
  REGION 1..15: note = epitope
VYSANTHRSKWFRVV

SEQ ID NO: 2810 - protein, 15 aa, synthetic construct
  REGION 1..15: note = epitope
  SITE 1: note = misc_feature - Xaa can be any naturally occurring amino acid
  REGION 3..7: note = misc_feature - Xaa can be any naturally occurring amino acid
  SITE 10: note = misc_feature - Xaa can be any naturally occurring amino acid
  REGION 12..15: note = misc_feature - Xaa can be any naturally occurring amino acid
XYXXXXXRSXWXXXX

SEQ ID NO: 2811 - protein, 5 aa, synthetic construct
  REGION 1..5: note = epitope
SANTH

SEQ ID NO: 2812 - protein, 15 aa, synthetic construct
  REGION 1..15: note = epitope
  REGION 1..7: note = misc_feature - Xaa can be any naturally occurring amino acid
  REGION 12..15: note = misc_feature - Xaa can be any naturally occurring amino acid
XXXXXXXRSKWXXXX

SEQ ID NO: 2813 - protein, 15 aa, synthetic construct
  REGION 1..15: note = epitope
  SITE 1: note = misc_feature - Xaa can be any naturally occurring amino acid
  REGION 3..4: note = misc_feature - Xaa can be any naturally occurring amino acid
  REGION 6..8: note = misc_feature - Xaa can be any naturally occurring amino acid
  SITE 10: note = misc_feature - Xaa can be any naturally occurring amino acid
  REGION 12..15: note = misc_feature - Xaa can be any naturally occurring amino acid
XYXXNXXXSXWXXXX

SEQ ID NO: 2814 - protein, 5 aa, synthetic construct
  REGION 1..5: note = epitope
SANTH

SEQ ID NO: 2815 - protein, 4 aa, synthetic construct
  REGION 1..4: note = epitope
NTHR

SEQ ID NO: 2816 - protein, 15 aa, synthetic construct
  REGION 1..15: note = epitope
  REGION 1..4: note = misc_feature - Xaa can be any naturally occurring amino acid
  SITE 8: note = misc_feature - Xaa can be any naturally occurring amino acid
  SITE 10: note = misc_feature - Xaa can be any naturally occurring amino acid
  REGION 14..15: note = misc_feature - Xaa can be any naturally occurring amino acid
XXXXNTHXSXWFRXX

SEQ ID NO: 2817 - protein, 6 aa, synthetic construct
  REGION 1..6: note = epitope
SANTHR

SEQ ID NO: 2818 - protein, 5 aa, synthetic construct
  REGION 1..5: note = epitope
SANTH

SEQ ID NO: 2819 - protein, 5 aa, synthetic construct
  REGION 1..5: note = epitope
KWFRV

SEQ ID NO: 2820 - protein, 15 aa, synthetic construct
  REGION 1..15: note = epitope
  SITE 1: note = misc_feature - Xaa can be any naturally occurring amino acid
  REGION 3..4: note = misc_feature - Xaa can be any naturally occurring amino acid
  SITE 7: note = misc_feature - Xaa can be any naturally occurring amino acid
  SITE 10: note = misc_feature - Xaa can be any naturally occurring amino acid
  REGION 12..15: note = misc_feature - Xaa can be any naturally occurring amino acid
XYXXNTXRSXWXXXX

SEQ ID NO: 2821 - protein, 5 aa, synthetic construct
  REGION 1..5: note = epitope
SANTH

SEQ ID NO: 2822 - protein, 6 aa, synthetic construct
  REGION 1..6: note = epitope
SANTHR

SEQ ID NO: 2823 - protein, 10 aa, synthetic construct
  REGION 1..10: note = epitope
NTHRSKWFRV

SEQ ID NO: 2824 - protein, 15 aa, synthetic construct
  REGION 1..15: note = epitope
  REGION 5..7: note = misc_feature - Xaa can be any naturally occurring amino acid
  REGION 9..15: note = misc_feature - Xaa can be any naturally occurring amino acid
VYSAXXXRXXXXXXX

SEQ ID NO: 2825 - protein, 6 aa, synthetic construct
  REGION 1..6: note = epitope
YSANTH

SEQ ID NO: 2826 - protein, 4 aa, synthetic construct
  REGION 1..4: note = epitope
SANT

SEQ ID NO: 2827 - protein, 15 aa, synthetic construct
  REGION 1..15: note = epitope
  REGION 1..3: note = misc_feature - Xaa can be any naturally occurring amino acid
  REGION 8..10: note = misc_feature - Xaa can be any naturally occurring amino acid
  REGION 13..15: note = misc_feature - Xaa can be any naturally occurring amino acid
XXXANTHXXXWFXXX

SEQ ID NO: 2828 - protein, 9 aa, synthetic construct
  REGION 1..9: note = epitope
SANTHRSKW

SEQ ID NO: 2829 - protein, 9 aa, synthetic construct
  REGION 1..9: note = epitope
  SITE 1: note = misc_feature - Xaa can be any naturally occurring amino acid
  REGION 6..8: note = misc_feature - Xaa can be any naturally occurring amino acid
XANTHXXXW

SEQ ID NO: 2830 - protein, 15 aa, synthetic construct
  REGION 1..15: note = epitope
YIVVEGRDGYFEMAC

SEQ ID NO: 2831 - protein, 15 aa, synthetic construct
  REGION 1..15: note = epitope
  REGION 2..3: note = misc_feature - Xaa can be any naturally occurring amino acid
  SITE 5: note = misc_feature - Xaa can be any naturally occurring amino acid
  SITE 10: note = misc_feature - Xaa can be any naturally occurring amino acid
  REGION 12..15: note = misc_feature - Xaa can be any naturally occurring amino acid
YXXVXGRDGXFXXXX

SEQ ID NO: 2832 - protein, 6 aa, synthetic construct
  REGION 1..6: note = epitope
YIVVEG

SEQ ID NO: 2833 - protein, 9 aa, synthetic construct
  REGION 1..9: note = epitope
EGRDGYFEM

SEQ ID NO: 2834 - protein, 9 aa, synthetic construct
  REGION 1..9: note = epitope
  SITE 1: note = misc_feature - Xaa can be any naturally occurring amino acid
  SITE 6: note = misc_feature - Xaa can be any naturally occurring amino acid
  REGION 8..9: note = misc_feature - Xaa can be any naturally occurring amino acid
XGRDGXFXX

SEQ ID NO: 2835 - protein, 15 aa, synthetic construct
  REGION 1..15: note = epitope
  SITE 2: note = misc_feature - Xaa can be any naturally occurring amino acid
  SITE 5: note = misc_feature - Xaa can be any naturally occurring amino acid
  SITE 7: note = misc_feature - Xaa can be any naturally occurring amino acid
  REGION 10..15: note = misc_feature - Xaa can be any naturally occurring amino acid
YXVVXGXDGXXXXXX

SEQ ID NO: 2836 - protein, 5 aa, synthetic construct
  REGION 1..5: note = epitope
IVVEG

SEQ ID NO: 2837 - protein, 9 aa, synthetic construct
  REGION 1..9: note = epitope
EGRDGYFEM

SEQ ID NO: 2838 - protein, 5 aa, synthetic construct
  REGION 1..5: note = epitope
IVVEG

SEQ ID NO: 2839 - protein, 9 aa, synthetic construct
  REGION 1..9: note = epitope
EGRDGYFEM

SEQ ID NO: 2840 - protein, 15 aa, synthetic construct
  REGION 1..15: note = epitope
  SITE 6: note = misc_feature - Xaa can be any naturally occurring amino acid
  REGION 9..15: note = misc_feature - Xaa can be any naturally occurring amino acid
YIVVEXRDXXXXXXX

SEQ ID NO: 2841 - protein, 15 aa, synthetic construct
  REGION 1..15: note = epitope
  REGION 2..3: note = misc_feature - Xaa can be any naturally occurring amino acid
  SITE 6: note = misc_feature - Xaa can be any naturally occurring amino acid
  SITE 10: note = misc_feature - Xaa can be any naturally occurring amino acid
  REGION 12..15: note = misc_feature - Xaa can be any naturally occurring amino acid
YXXVEXRDGXFXXXX

SEQ ID NO: 2842 - protein, 6 aa, synthetic construct
  REGION 1..6: note = epitope
YIVVEG

SEQ ID NO: 2843 - protein, 5 aa, synthetic construct
  REGION 1..5: note = epitope
IVVEG

SEQ ID NO: 2844 - protein, 9 aa, synthetic construct
  REGION 1..9: note = epitope
EGRDGYFEM

SEQ ID NO: 2845 - protein, 6 aa, synthetic construct
  REGION 1..6: note = epitope
YIVVEG

SEQ ID NO: 2846 - protein, 5 aa, synthetic construct
  REGION 1..5: note = epitope
IVVEG

SEQ ID NO: 2847 - protein, 10 aa, synthetic construct
  REGION 1..10: note = epitope
EGRDGYFEMA

SEQ ID NO: 2848 - protein, 9 aa, synthetic construct
  REGION 1..9: note = epitope
EGRDGYFEM

SEQ ID NO: 2849 - protein, 15 aa, synthetic construct
  REGION 1..15: note = epitope
  SITE 3: note = misc_feature - Xaa can be any naturally occurring amino acid
  REGION 12..15: note = misc_feature - Xaa can be any naturally occurring amino acid
YIXVEGRDGYFXXXX

SEQ ID NO: 2850 - protein, 5 aa, synthetic construct
  REGION 1..5: note = epitope
IVVEG

SEQ ID NO: 2851 - protein, 9 aa, synthetic construct
  REGION 1..9: note = epitope
EGRDGYFEM

SEQ ID NO: 2852 - protein, 5 aa, synthetic construct
  REGION 1..5: note = epitope
IVVEG

SEQ ID NO: 2853 - protein, 9 aa, synthetic construct
  REGION 1..9: note = epitope
EGRDGYFEM

SEQ ID NO: 2854 - protein, 15 aa, synthetic construct
  REGION 1..15: note = epitope
  SITE 2: note = misc_feature - Xaa can be any naturally occurring amino acid
  REGION 5..6: note = misc_feature - Xaa can be any naturally occurring amino acid
  SITE 10: note = misc_feature - Xaa can be any naturally occurring amino acid
  REGION 12..15: note = misc_feature - Xaa can be any naturally occurring amino acid
YXVVXXRDGXFXXXX

SEQ ID NO: 2855 - protein, 15 aa, synthetic construct
  REGION 1..15: note = epitope
  REGION 2..6: note = misc_feature - Xaa can be any naturally occurring amino acid
  SITE 8: note = misc_feature - Xaa can be any naturally occurring amino acid
  SITE 10: note = misc_feature - Xaa can be any naturally occurring amino acid
  REGION 12..15: note = misc_feature - Xaa can be any naturally occurring amino acid
YXXXXXRXGXFXXXX

SEQ ID NO: 2856 - protein, 5 aa, synthetic construct
  REGION 1..5: note = epitope
IVVEG

SEQ ID NO: 2857 - protein, 9 aa, synthetic construct
  REGION 1..9: note = epitope
EGRDGYFEM

SEQ ID NO: 2858 - protein, 15 aa, synthetic construct
  REGION 1..15: note = epitope
  REGION 2..4: note = misc_feature - Xaa can be any naturally occurring amino acid
  SITE 6: note = misc_feature - Xaa can be any naturally occurring amino acid
  SITE 8: note = misc_feature - Xaa can be any naturally occurring amino acid
  REGION 10..15: note = misc_feature - Xaa can be any naturally occurring amino acid
YXXXVXGXDXXXXXX

SEQ ID NO: 2859 - protein, 15 aa, synthetic construct
  REGION 1..15: note = epitope
  REGION 2..5: note = misc_feature - Xaa can be any naturally occurring amino acid
  SITE 15: note = misc_feature - Xaa can be any naturally occurring amino acid
YXXXXGRDGYFEMAX

SEQ ID NO: 2860 - protein, 15 aa, synthetic construct
  REGION 1..15: note = epitope
  REGION 2..5: note = misc_feature - Xaa can be any naturally occurring amino acid
  SITE 12: note = misc_feature - Xaa can be any naturally occurring amino acid
  SITE 15: note = misc_feature - Xaa can be any naturally occurring amino acid
YXXXXGRDGYFXMAX

SEQ ID NO: 2861 - protein, 15 aa, synthetic construct
  REGION 1..15: note = epitope
  REGION 2..5: note = misc_feature - Xaa can be any naturally occurring amino acid
  SITE 8: note = misc_feature - Xaa can be any naturally occurring amino acid
  REGION 12..13: note = misc_feature - Xaa can be any naturally occurring amino acid
  SITE 15: note = misc_feature - Xaa can be any naturally occurring amino acid
YXXXXGRXGYFXXAX

SEQ ID NO: 2862 - protein, 5 aa, synthetic construct
  REGION 1..5: note = epitope
IVVEG

SEQ ID NO: 2863 - protein, 10 aa, synthetic construct
  REGION 1..10: note = epitope
VEGRDGYFEM

SEQ ID NO: 2864 - protein, 5 aa, synthetic construct
  REGION 1..5: note = epitope
IVVEG

SEQ ID NO: 2865 - protein, 9 aa, synthetic construct
  REGION 1..9: note = epitope
EGRDGYFEM

SEQ ID NO: 2866 - protein, 15 aa, synthetic construct
  REGION 1..15: note = epitope
  REGION 2..6: note = misc_feature - Xaa can be any naturally occurring amino acid
  SITE 8: note = misc_feature - Xaa can be any naturally occurring amino acid
  SITE 10: note = misc_feature - Xaa can be any naturally occurring amino acid
  REGION 12..14: note = misc_feature - Xaa can be any naturally occurring amino acid
YXXXXXRXGXFXXXC

SEQ ID NO: 2867 - protein, 9 aa, synthetic construct
  REGION 1..9: note = epitope
YIVVEGRDG

SEQ ID NO: 2868 - protein, 8 aa, synthetic construct
  REGION 1..8: note = epitope
EGRDGYFE

SEQ ID NO: 2869 - protein, 15 aa, synthetic construct
  REGION 1..15: note = epitope
  SITE 3: note = misc_feature - Xaa can be any naturally occurring amino acid
  REGION 5..6: note = misc_feature - Xaa can be any naturally occurring amino acid
  SITE 10: note = misc_feature - Xaa can be any naturally occurring amino acid
  REGION 12..13: note = misc_feature - Xaa can be any naturally occurring amino acid
  SITE 15: note = misc_feature - Xaa can be any naturally occurring amino acid
YIXVXXRDGXFXXAX

SEQ ID NO: 2870 - protein, 15 aa, synthetic construct
  REGION 1..15: note = epitope
  REGION 2..6: note = misc_feature - Xaa can be any naturally occurring amino acid
  SITE 10: note = misc_feature - Xaa can be any naturally occurring amino acid
  REGION 12..15: note = misc_feature - Xaa can be any naturally occurring amino acid
YXXXXXRDGXFXXXX

SEQ ID NO: 2871 - protein, 5 aa, synthetic construct
  REGION 1..5: note = epitope
VVEGR

SEQ ID NO: 2872 - protein, 10 aa, synthetic construct
  REGION 1..10: note = epitope
EGRDGYFEMA

SEQ ID NO: 2873 - protein, 10 aa, synthetic construct
  REGION 1..10: note = epitope
  REGION 1..2: note = misc_feature - Xaa can be any naturally occurring amino acid
  SITE 6: note = misc_feature - Xaa can be any naturally occurring amino acid
  REGION 8..9: note = misc_feature - Xaa can be any naturally occurring amino acid
XXRDGXFXXA

SEQ ID NO: 2874 - protein, 10 aa, synthetic construct
  REGION 1..10: note = epitope
  REGION 1..2: note = misc_feature - Xaa can be any naturally occurring amino acid
  SITE 6: note = misc_feature - Xaa can be any naturally occurring amino acid
  REGION 8..10: note = misc_feature - Xaa can be any naturally occurring amino acid
XXRDGXFXXX

SEQ ID NO: 2875 - protein, 4 aa, synthetic construct
  REGION 1..4: note = epitope
VVEG

SEQ ID NO: 2876 - protein, 15 aa, synthetic construct
  REGION 1..15: note = epitope
  REGION 6..10: note = misc_feature - Xaa can be any naturally occurring amino acid
  REGION 13..15: note = misc_feature - Xaa can be any naturally occurring amino acid
YIVVEXXXXXFEXXX

SEQ ID NO: 2877 - protein, 4 aa, synthetic construct
  REGION 1..4: note = epitope
VVEG

SEQ ID NO: 2878 - protein, 5 aa, synthetic construct
  REGION 1..5: note = epitope
IVVEG

SEQ ID NO: 2879 - protein, 9 aa, synthetic construct
  REGION 1..9: note = epitope
EGRDGYFEM

SEQ ID NO: 2880 - protein, 15 aa, synthetic construct
  REGION 1..15: note = epitope
NSQLIQMQQLQIQQQ

SEQ ID NO: 2881 - protein, 15 aa, synthetic construct
  REGION 1..15: note = epitope
QEQQQYYPQQQAFFL

SEQ ID NO: 2882 - protein, 6 aa, synthetic construct
  REGION 1..6: note = epitope
SFPQQQ

SEQ ID NO: 2883 - protein, 10 aa, synthetic construct
  REGION 1..10: note = epitope
LKIGATEPSQ

SEQ ID NO: 2884 - protein, 4 aa, synthetic construct
  REGION 1..4: note = epitope
IGAT

SEQ ID NO: 2885 - protein, 15 aa, synthetic construct
  REGION 1..15: note = epitope
QQYYPQQQAFFLLQQ

SEQ ID NO: 2886 - protein, 5 aa, synthetic construct
  REGION 1..5: note = epitope
PLVQQ

SEQ ID NO: 2887 - protein, 5 aa, synthetic construct
  REGION 1..5: note = epitope
KLVQQ

SEQ ID NO: 2888 - protein, 8 aa, synthetic construct
  REGION 1..8: note = epitope
QQFPGQQQ

SEQ ID NO: 2889 - protein, 10 aa, synthetic construct
  REGION 1..10: note = epitope
ILFEETLYQS

SEQ ID NO: 2890 - protein, 5 aa, synthetic construct
  REGION 1..5: note = epitope
QSTKG

SEQ ID NO: 2891 - protein, 4 aa, synthetic construct
  REGION 1..4: note = epitope
QSTK

SEQ ID NO: 2892 - protein, 7 aa, synthetic construct
  REGION 1..7: note = epitope
PQPQPFP

SEQ ID NO: 2893 - protein, 9 aa, synthetic construct
  REGION 1..9: note = epitope
QQFPGQQQP

SEQ ID NO: 2894 - protein, 4 aa, synthetic construct
  REGION 1..4: note = epitope
AAAA

SEQ ID NO: 2895 - protein, 5 aa, synthetic construct
  REGION 1..5: note = epitope
QQFPG

SEQ ID NO: 2896 - protein, 7 aa, synthetic construct
  REGION 1..7: note = epitope
QLVPQLQ

SEQ ID NO: 2897 - protein, 7 aa, synthetic construct
  REGION 1..7: note = epitope
QPYPQLQ

SEQ ID NO: 2898 - protein, 7 aa, synthetic construct
  REGION 1..7: note = epitope
QQPPFLQ

SEQ ID NO: 2899 - protein, 7 aa, synthetic construct
  REGION 1..7: note = epitope
QDMPYLQ

SEQ ID NO: 2900 - protein, 15 aa, synthetic construct
  REGION 1..15: note = epitope
NEPSQLSIDQNAQGL

SEQ ID NO: 2901 - protein, 7 aa, synthetic construct
  REGION 1..7: note = epitope
QVPLVQQ

SEQ ID NO: 2902 - protein, 5 aa, synthetic construct
  REGION 1..5: note = epitope
YNPDK

SEQ ID NO: 2903 - protein, 6 aa, synthetic construct
  REGION 1..6: note = epitope
FVPISG

SEQ ID NO: 2904 - protein, 6 aa, synthetic construct
  REGION 1..6: note = epitope
KEAANF

SEQ ID NO: 2905 - protein, 6 aa, synthetic construct
  REGION 1..6: note = epitope
SQVIIM

SEQ ID NO: 2906 - protein, 7 aa, synthetic construct
  REGION 1..7: note = epitope
VSSYLKK

SEQ ID NO: 2907 - protein, 6 aa, synthetic construct
  REGION 1..6: note = epitope
KVGYNP

SEQ ID NO: 2908 - protein, 6 aa, synthetic construct
  REGION 1..6: note = epitope
SGKELE

SEQ ID NO: 2909 - protein, 4 aa, synthetic construct
  REGION 1..4: note = epitope
PKFL

SEQ ID NO: 2910 - protein, 15 aa, synthetic construct
  REGION 1..15: note = epitope
SLAEYTVRTLQRTVP

SEQ ID NO: 2911 - protein, 6 aa, synthetic construct
  REGION 1..6: note = epitope
TVRTLQ

SEQ ID NO: 2912 - protein, 7 aa, synthetic construct
  REGION 1..7: note = epitope
QVPLVQQ

SEQ ID NO: 2913 - protein, 7 aa, synthetic construct
  REGION 1..7: note = epitope
QQFPGQQ

SEQ ID NO: 2914 - protein, 5 aa, synthetic construct
  REGION 1..5: note = epitope
YLSGV

SEQ ID NO: 2915 - protein, 9 aa, synthetic construct
  REGION 1..9: note = epitope
CTIAPFGIF

SEQ ID NO: 2916 - protein, 6 aa, synthetic construct
  REGION 1..6: note = epitope
GIFGTN

SEQ ID NO: 2917 - protein, 9 aa, synthetic construct
  REGION 1..9: note = epitope
RLLRGIRNY

SEQ ID NO: 2918 - protein, 7 aa, synthetic construct
  REGION 1..7: note = epitope
IRNYRVA

SEQ ID NO: 2919 - protein, 5 aa, synthetic construct
  REGION 1..5: note = epitope
SRLLR

SEQ ID NO: 2920 - protein, 10 aa, synthetic construct
  REGION 1..10: note = epitope
LLRGIRNYRV

SEQ ID NO: 2921 - protein, 7 aa, synthetic construct
  REGION 1..7: note = epitope
RNYRVAI

SEQ ID NO: 2922 - protein, 6 aa, synthetic construct
  REGION 1..6: note = epitope
GIDKRV

SEQ ID NO: 2923 - protein, 9 aa, synthetic construct
  REGION 1..9: note = epitope
KRVIERFEK

SEQ ID NO: 2924 - protein, 4 aa, synthetic construct
  REGION 1..4: note = epitope
GIDK

SEQ ID NO: 2925 - protein, 10 aa, synthetic construct
  REGION 1..10: note = epitope
DKRVIERFEK

SEQ ID NO: 2926 - protein, 4 aa, synthetic construct
  REGION 1..4: note = epitope
QVSF

SEQ ID NO: 2927 - protein, 10 aa, synthetic construct
  REGION 1..10: note = epitope
SFQPSQLNPQ

SEQ ID NO: 2928 - protein, 6 aa, synthetic construct
  REGION 1..6: note = epitope
YKGPTL

SEQ ID NO: 2929 - protein, 8 aa, synthetic construct
  REGION 1..8: note = epitope
YKIGGIGT

SEQ ID NO: 2930 - protein, 5 aa, synthetic construct
  REGION 1..5: note = epitope
AGIVK

SEQ ID NO: 2931 - protein, 6 aa, synthetic construct
  REGION 1..6: note = epitope
VKMIPT

SEQ ID NO: 2932 - protein, 6 aa, synthetic construct
  REGION 1..6: note = epitope
YIVVEG

SEQ ID NO: 2933 - protein, 307 aa, Triticum aestivum; identical to SEQ ID NO: 2

SEQ ID NO: 2934 - protein, 350 aa, Triticum aestivum; identical to SEQ ID NO: 4

SEQ ID NO: 2935 - protein, 327 aa, Triticum aestivum; identical to SEQ ID NO: 6

SEQ ID NO: 2936 - protein, 349 aa, Triticum aestivum; identical to SEQ ID NO: 8

SEQ ID NO: 2937 - protein, 313 aa, Triticum aestivum; identical to SEQ ID NO: 10

SEQ ID NO: 2938 - protein, 295 aa, Triticum aestivum; identical to SEQ ID NO: 12

SEQ ID NO: 2939 - protein, 339 aa, Triticum aestivum; identical to SEQ ID NO: 14

SEQ ID NO: 2940 - protein, 292 aa, Triticum aestivum; identical to SEQ ID NO: 16

SEQ ID NO: 2941 - protein, 365 aa, Triticum aestivum; identical to SEQ ID NO: 18

SEQ ID NO: 2942 - protein, 461 aa, Triticum aestivum; identical to SEQ ID NO: 20

SEQ ID NO: 2943 - protein, 588 aa, Triticum aestivum; identical to SEQ ID NO: 22

SEQ ID NO: 2944 - protein, 447 aa, Triticum aestivum; identical to SEQ ID NO: 24

SEQ ID NO: 2945 - protein, 283 aa, Triticum aestivum; identical to SEQ ID NO: 26

SEQ ID NO: 2946 - protein, 327 aa, Triticum aestivum; identical to SEQ ID NO: 28
